(19) United States
(12) Patent Application Publication
(10) Pub. No.: US 2023/0016618 A1
(43) Pub. Date: Jan. 19, 2023

(54) MODIFICATION OF HECT E3 UBIQUITIN LIGASE GENES TO IMPROVE YIELD TRAITS

(71) Applicant: Pairwise Plants Services, Inc., Durham, NC (US)

(72) Inventors: Pradeep Reddy Marri, Cary, NC (US); Lolita George Mathew, Cary, NC (US); HaeJin Kim, Durham, NC (US)

(21) Appl. No.: 17/847,285

(22) Filed: Jun. 23, 2022

Related U.S. Application Data
(60) Provisional application No. 63/214,498, filed on Jun. 24, 2021.

(51) Int. Cl. C12N 15/82; C12N 9/00; C12Q 1/25

(52) U.S. Cl. CPC C12N 15/8261; C12N 9/93; C12Q 1/25; C12N 15/8213; C12Y 203/02; C12N 2310/20

(57) ABSTRACT

This invention relates to compositions and methods for modifying Homologous to E6AP C-Terminus (HECT) E3 Ubiquitin Protein Ligase (UPL) genes in plants, optionally to improve yield traits. The invention further relates to plants having increased improved yield traits produced using the methods and compositions of the invention.

### STATEMENT OF PRIORITY

[0001] This application claims the benefit, under 35 U.S.C. § 119 (e), of U.S. Provisional Application No. 63/214,498 filed on Jun. 24, 2021, the entire contents of which is incorporated by reference herein.

### STATEMENT REGARDING ELECTRONIC FILING OF A SEQUENCE LISTING

[0002] A Sequence Listing in ASCII text format, submitted under 37 C.F.R. § 1.821, entitled 1499.61_ST25.txt, 727,908 bytes in size, generated on Jun. 11, 2022 and filed via EFS-Web, is provided in lieu of a paper copy. This Sequence Listing is hereby incorporated herein by reference into the specification for its disclosures.

### FIELD OF THE INVENTION

[0003] This invention relates to compositions and methods for modifying Homologous to E6AP C-Terminus (HECT) E3 Ubiquitin Protein Ligase (UPL) genes in plants, optionally to improve yield traits. The invention further relates to plants having increased improved yield traits produced using the methods and compositions of the invention.

### BACKGROUND OF THE INVENTION

[0004] With a growing population to feed, there is continuous need to increase the crop yields. Currently, key staple crops, including soybean, increase yield only by 0.9-1.6% per year and this magnitude of yield increase is not enough to meet the future needs in food production. The present invention addresses these shortcomings in the art by providing new compositions and methods for improving/enhancing yield traits in plants, including soybean, corn and other plant species.

### SUMMARY OF THE INVENTION

[0005] One aspect of the invention provides a plant or plant part thereof comprising at least one non-natural mutation in an endogenous Homologous to E6AP C-Terminus (HECT) E3 Ubiquitin Protein Ligase (UPL) gene encoding a HECT E3 UPL polypeptide.

[0006] A second aspect of the invention provides a plant cell, comprising an editing system comprising: (a) a CRISPR-Cas effector protein; and (b) a guide nucleic acid (e.g., gRNA, gDNA, crRNA, crDNA, sgRNA, sgDNA) comprising a spacer sequence with complementarity to an endogenous target gene encoding a Homologous to E6AP C-Terminus (HECT) E3 Ubiquitin Protein Ligase (UPL) (HECT E3 UPL) polypeptide.

[0007] A third aspect of the invention provides a method of producing/breeding a transgene-free edited plant, comprising: crossing the plant of the invention with a transgene free plant, thereby introducing the at least one non-natural mutation into the plant that is transgene-free; and selecting a progeny plant that comprises the at least one non-natural mutation and is transgene-free, thereby producing a transgene free edited plant.

[0008] A fourth aspect of the invention provides a method of providing a plurality of plants having one or more improved yield traits, optionally increased seed size (e.g., seed area and/or seed weight) and/or seed oil content, the method comprising planting two or more plants of the invention in a growing area, thereby providing a plurality of plants having one or more improved yield traits as compared to a plurality of control plants not comprising the at least one non-natural mutation.

[0009] A fifth aspect of the invention provides a method of generating variation in a region of a Homologous to E6AP C-Terminus (HECT) E3 Ubiquitin Protein Ligase (UPL) polypeptide, comprising: introducing an editing system into a plant cell, wherein the editing system is targeted to a region of a HECT E3 UPL gene that encodes the region of the HECT E3 UPL polypeptide, wherein the region of the HECT E3 UPL polypeptide comprises (a) a sequence having at least 80% sequence identity to an amino acid sequence of any one of SEQ ID NOs:84-92, (b) a sequence having at least 80% sequence identity to a region of consecutive amino acid residues: from residue 50 to residue 95, residue 43 to residue 102, residue 36 to residue 109, residue 1814 to residue 1865, residue 1822 to residue 1857, and/or residue 1829 to residue 1851 with reference to the residue numbering of SEQ ID NO:78, from residue 48 to residue 87, residue 41 to residue 94, residue 34 to residue 101, residue 1820 to residue 1870, residue 1827 to residue 1863, and/or residue 1834 to residue 1856 with reference to the residue numbering of SEQ ID NO:79, from residue 139 to residue 194, residue 132 to residue 201, residue 125 to residue 208, residue 1838 to residue 1888, residue 1845 to residue 1881, and/or residue 1852 to residue 1874 with reference to the residue numbering of SEQ ID NO:80, from residue 104 to residue 146, residue 97 to residue 153, residue 90 to residue 160, residue 1834 to residue 1884, residue 1841 to residue 1877, and/or residue 1848 to residue 1870 with reference to the residue numbering of SEQ ID NO:81, from residue 1783 to residue 1833, residue 1790 to residue 1826, and/or residue 1797-1818 with reference to the residue numbering of SEQ ID NO:82, and/or from residue 1776 to residue 1826, residue 1783 to residue 1819, and/or residue 1790 to residue 1812 with reference to the residue numbering of SEQ ID NO:83; or (c) comprises a sequence having at least 90% sequence identity to the amino acid sequence of SEQ ID NO:93; contacting the region of the HECT E3 UPL gene with the editing system, thereby introducing into the plant cell a mutation into the region of the HECT E3 UPL polypeptide; and generating variation in the region of the HECT E3 UPL polypeptide.

[0010] A sixth aspect provides a method for editing a specific site in the genome of a plant cell, the method comprising: cleaving, in a site-specific manner, a target site within an endogenous Homologous to E6AP C-Terminus (HECT) E3 Ubiquitin Protein Ligase (UPL) gene in the plant cell, the endogenous HECT E3 UPL gene: (a) comprising a sequence having at least 80% sequence identity to any one of the nucleotide sequences of SEQ ID NOs:72-77, (b) encoding a sequence having at least 80% sequence identity to an amino acid sequence of any one of SEQ ID NOs:78-83, (c) encoding a region having at least 80% sequence identity to an amino acid sequence of any one of SEQ ID NOs:84-92, and/or (d) encoding a region having at least 90% identity to the amino acid sequence of SEQ ID NO:93, thereby generating an edit in the endogenous HECT E3 UPL gene of the plant cell and producing a plant cell comprising the edit in the endogenous HECT E3 UPL gene.

[0011] A seventh aspect provides a method for making a plant, comprising: (a) contacting a population of plant cells comprising an endogenous Homologous to E6AP C-Terminus (HECT) E3 Ubiquitin Protein Ligase (UPL) gene with a nuclease linked to a nucleic acid binding domain (e.g., editing system) that binds to a sequence (a) having at least 80% sequence identity to the nucleotide sequence of any one of SEQ ID NOs:72-77, (b) encoding an amino acid sequence having at least 80% sequence identity to any one of SEQ ID NOs:78-83, (c) encoding an amino acid sequence comprising a region having at least 80% sequence identity to any one of SEQ ID NOs:84-92, and/or (d) encoding an amino acid sequence comprising a region having at least 90% identity to the amino acid sequence of SEQ ID NO:93; (b) selecting a plant cell from the population in which an endogenous HECT E3 UPL gene has been mutated, thereby producing a plant cell comprising a mutation in the endogenous HECT E3 UPL gene; and (c) growing the selected plant cell into a plant.

[0012] An eighth aspect provides a method for improving one or more yield traits in a plant, comprising (a) contacting a plant cell comprising an endogenous Homologous to E6AP C-Terminus (HECT) E3 Ubiquitin Protein Ligase (UPL) gene with a nuclease targeting the endogenous HECT E3 UPL gene, wherein the nuclease is linked to a nucleic acid binding domain (e.g., editing system) that binds to a target site in the endogenous HECT E3 UPL gene, wherein the endogenous HECT E3 UPL gene: (i) comprises a sequence having at least 80% sequence identity to the nucleotide sequence of any one of SEQ ID NOs:72-77; (ii) encodes an amino acid sequence having at least 80% sequence identity to any one of SEQ ID NOs:78-83; (iii) encodes an amino acid sequence comprising a region having at least 80% sequence identity to any one of SEQ ID NOs:84-92; and/or (iv) encodes an amino acid sequence comprising a region having at least 90% identity to the amino acid sequence of SEQ ID NO:93 to produce a plant cell comprising a mutation in the endogenous HECT E3 UPL gene; and (b) growing the plant cell into a plant comprising the mutation in the endogenous HECT E3 UPL gene thereby producing a plant have a mutated endogenous HECT E3 UPL gene and one or more improved yield traits, optionally increased seed size (e.g., seed area and/or seed weight) and/or seed oil content.

[0013] A ninth aspect provides producing a plant or part thereof comprising at least one cell having a mutated endogenous Homologous to E6AP C-Terminus (HECT) E3 Ubiquitin Protein Ligase (UPL) gene, the method comprising contacting a target site in an endogenous HECT E3 UPL gene in the plant or plant part with a nuclease comprising a cleavage domain and a nucleic acid binding domain, wherein the nucleic acid binding domain binds to a target site in the endogenous HECT E3 UPL gene, wherein the endogenous HECT E3 UPL gene (a) comprises a sequence having at least 80% sequence identity to the nucleotide sequence of any one of SEQ ID NOs:72-77; (b) encodes an amino acid sequence having at least 80% sequence identity to any one of SEQ ID NOs:78-83; (c) encodes an amino acid sequence comprising a region having at least 80% sequence identity to any one of SEQ ID NOs:84-92; and/or (d) encodes an amino acid sequence comprising a region having at least 90% identity to the amino acid sequence of SEQ ID NO:93, thereby producing the plant or part thereof comprising at least one cell having a mutation in the endogenous HECT E3 UPL gene.

[0014] A tenth aspect of the invention provides a method for producing a plant or part thereof comprising a mutated endogenous Homologous to E6AP C-Terminus (HECT) E3 Ubiquitin Protein Ligase (UPL) gene and exhibiting one or more improved yield traits, the method comprising contacting a target site in an endogenous HECT E3 UPL gene in the plant or plant part with a nuclease comprising a cleavage domain and a nucleic acid binding domain, wherein the nucleic acid binding domain binds to a target site in the endogenous HECT E3 UPL gene, wherein the endogenous HECT E3 UPL gene: (a) comprises a sequence having at least 80% sequence identity to the nucleotide sequence of any one of SEQ ID NOs:72-77; (b) encodes an amino acid sequence having at least 80% sequence identity to any one of SEQ ID NOs:78-83; (c) encodes an amino acid sequence comprising a region having at least 80% sequence identity to any one of SEQ ID NOs:84-92; and/or (d) encodes an amino acid sequence comprising a region having at least 90% identity to the amino acid sequence of SEQ ID NO:93, thereby producing the plant or part thereof comprising an endogenous HECT E3 UPL gene having a mutation and exhibiting one or more improved yield traits, optionally increased seed size (e.g., seed area and/or seed weight) and/or increased seed oil content.

[0015] An eleventh aspect provides a guide nucleic acid that binds to a target site in a Homologous to E6AP C-Terminus (HECT) E3 Ubiquitin Protein Ligase (UPL) gene, the target site in a region of the HECT E3 UPL3 gene: (a) encoding a sequence having at least 80% sequence identity to an amino acid sequence of any one of SEQ ID NOs:84-92, (b) encoding a sequence having at least 80% sequence identity to a region of consecutive amino acid residues: from residue 50 to residue 95, residue 43 to residue 102, residue 36 to residue 109, residue 1814 to residue 1865, residue 1822 to residue 1857, and/or residue 1829 to residue 1851 with reference to the residue numbering of SEQ ID NO:78, from residue 48 to residue 87, residue 41 to residue 94, residue 34 to residue 101, residue 1820 to residue 1870, residue 1827 to residue 1863, and/or residue 1834 to residue 1856 with reference to the residue numbering of SEQ ID NO:79, from residue 139 to residue 194, residue 132 to residue 201, residue 125 to residue 208, residue 1838 to residue 1888, residue 1845 to residue 1881, and/or residue 1852 to residue 1874 with reference to the residue numbering of SEQ ID NO:80, from residue 104 to residue 146, residue 97 to residue 153, residue 90 to residue 160, residue 1834 to residue 1884, residue 1841 to residue 1877, and/or residue 1848 to residue 1870 with reference to the residue numbering of SEQ ID NO:81, from residue 1783 to residue 1833, residue 1790 to residue 1826, and/or residue 1797 to residue 1818 with reference to the residue numbering of SEQ ID NO:82, and/or from residue 1776 to residue 1826, residue 1783 to residue 1819, and/or residue 1790 to residue 1812 with reference to the residue numbering of SEQ ID NO:83; and/or (c) encoding a sequence having at least 90% sequence identity to the amino acid sequence of SEQ ID NO:93.

[0016] In a twelfth aspect, a system is provided comprising a guide nucleic acid of the invention and a CRISPR-Cas effector protein that associates with the guide nucleic acid.

[0017] A thirteenth aspect provides a gene editing system comprising a CRISPR-Cas effector protein in association with a guide nucleic acid, wherein the guide nucleic acid comprises a spacer sequence that binds to an endogenous Homologous to E6AP C-Terminus (HECT) E3 Ubiquitin Protein Ligase (UPL) gene.

[0018] In a fourteenth aspect, a complex comprising a guide nucleic acid and a CRISPR-Cas effector protein comprising a cleavage domain is provided, wherein the guide nucleic acid binds to a target site in an endogenous Homologous to E6AP C-Terminus (HECT) E3 Ubiquitin Protein Ligase (UPL) gene, wherein the endogenous HECT E3 UPL3 gene: (a) comprises a sequence having at least 80% sequence identity to any one of the nucleotide sequences of SEQ ID NOs:72-77, (b) encodes a sequence having at least 80% sequence identity to an amino acid sequence of any one of SEQ ID NOs:78-83, (c) encodes a region having at least 80% sequence identity to an amino acid sequence of any one of SEQ ID NOs:84-92, and/or (d) encodes a region having at least 90% identity to the amino acid sequence of SEQ ID NO:93, wherein the cleavage domain cleaves a target strand in the HECT E3 UPL3 gene.

[0019] In a fifteenth aspect, an expression cassette is provided, the expression cassette comprising (a) a polynucleotide encoding CRISPR-Cas effector protein comprising a cleavage domain and (b) a guide nucleic acid that binds to a target site in an endogenous Homologous to E6AP C-Terminus (HECT) E3 Ubiquitin Protein Ligase (UPL) gene, wherein the guide nucleic acid comprises a spacer sequence that is complementary to and binds to (i) a portion of a sequence having at least 80% sequence identity to any one of the nucleotide sequences of SEQ ID NOs:72-77; (i) a portion of a nucleic acid encoding an amino acid sequence having at least 80% sequence identity to any one of SEQ ID NOs:78-83; (iii) a portion of a nucleic acid encoding an amino acid sequence having at least 80% sequence identity to any one of SEQ ID NOs:84-92; and/or (iv) a portion of a nucleic acid encoding an amino acid sequence having at least 90% sequence identity to SEQ ID NO:93.

[0020] In a sixteenth aspect, a nucleic acid encoding a dominant negative mutation or a null mutation of a Homologous to E6AP C-Terminus (HECT) E3 Ubiquitin Protein Ligase (UPL) polypeptide.

[0021] In a seventeenth aspect, a modified Homologous to E6AP C-Terminus (HECT) E3 Ubiquitin Protein Ligase (UPL) polypeptide is provided, the modified HECT E3 UPL polypeptide comprising a mutation in an amino acid residue located at position 1839 with reference to amino acid position numbering of SEQ ID NO:78, at position 1844 with reference to amino acid position numbering of SEQ ID NO:79, at position 1862 with reference to amino acid position numbering of SEQ ID NO:80, at position 1858 with reference to amino acid position numbering of SEQ ID NO:81, at position 1807 with reference to amino acid position numbering of SEQ ID NO:82, and/or at position 1800 with reference to amino acid position numbering of SEQ ID NO:83.

[0022] In an additional aspect, a method of creating a mutation in an endogenous Homologous to E6AP C-Terminus (HECT) E3 Ubiquitin Protein Ligase (UPL) gene in a plant is provided, comprising: (a) targeting a gene editing system to a portion of the HECT E3 UPL gene that (i) encodes the amino acids corresponding to position 1839 with reference to amino acid position numbering of SEQ ID NO:78, to position 1844 with reference to amino acid position numbering of SEQ ID NO:79, to position 1862 with reference to amino acid position numbering of SEQ ID NO:80, to position 1858 with reference to amino acid position numbering of SEQ ID NO:81, to position 1807 with reference to amino acid position numbering of SEQ ID NO:82, and/or to position 1800 with reference to amino acid position numbering of SEQ ID NO:83; (ii) encodes an amino acid sequence having at least 80% sequence identity to any one of SEQ ID NOs:78-83; (iii) encodes an amino acid sequence comprising a region having at least 80% sequence identity to any one of SEQ ID NOs:84-92; and/or (iv) encodes an amino acid sequence comprising a region having at least 90% identity to the amino acid sequence of SEQ ID NO:93, and (b) selecting a plant that comprises (i) a substitution of an amino acid residue at position 1839 with reference to amino acid position numbering of SEQ ID NO:78, to position 1844 with reference to amino acid position numbering of SEQ ID NO:79, to position 1862 with reference to amino acid position numbering of SEQ ID NO:80, to position 1858 with reference to amino acid position numbering of SEQ ID NO:81, to position 1807 with reference to amino acid position numbering of SEQ ID NO:82, and/or to position 1800 with reference to amino acid position numbering of SEQ ID NO:83; (ii) a mutation in the amino acid sequence having at least 80% sequence identity to any one of SEQ ID NOs:78-83; (iii) a mutation in the region having at least 80% sequence identity to any one of SEQ ID NOs:84-92; and/or (iv) a mutation in the region having at least 90% identity to the amino acid sequence of SEQ ID NO:93.

[0023] In another aspect, plants are provided that comprise in their genome one or more mutated Homologous to E6AP C-Terminus (HECT) E3 Ubiquitin Protein Ligase (UPL) genes produced by the methods of the invention.

[0024] A further aspect of the invention provides a corn plant or plant part thereof comprising at least one non-natural mutation in at least one endogenous Homologous to E6AP C-Terminus (HECT) E3 Ubiquitin Protein Ligase (UPL) gene having the gene identification number (gene ID) of Zm00001d014920 and/or Zm00001d004139.

[0025] In an additional aspect, a soybean plant or plant part thereof is provided the soybean plant comprising at least one non-natural mutation in at least one endogenous Homologous to E6AP C-Terminus (HECT) E3 Ubiquitin Protein Ligase (UPL) gene having the gene identification number (gene ID) of Glyma.11G107500, Glyma.12G032500, Glyma.06G003600 and/or Glyma.04G004000.

[0026] In a further aspect, a guide nucleic acid is provided that binds to a target nucleic acid within a Homologous to E6AP C-Terminus (HECT) E3 Ubiquitin Protein Ligase (UPL) gene, the HECT E3 UPL gene having the gene identification number (gene ID) of Zm00001d014920, Zm00001d004139, Glyma.11G107500, Glyma.12G032500, Glyma.06G003600 and/or Glyma.04G004000. Further provided are polypeptides, polynucleotides, nucleic acid constructs, expression cassettes and vectors for making a plant of this invention.

[0027] These and other aspects of the invention are set forth in more detail in the description of the invention below.

### BRIEF DESCRIPTION OF THE SEQUENCES

[0028] SEQ ID NOs:1-17 are exemplary Cas12a amino acid sequences useful with this invention.

[0029] SEQ ID NOs:18-20 are exemplary Cas12a nucleotide sequences useful with this invention.

[0030] SEQ ID NO:21-22 are exemplary regulatory sequences encoding a promoter and intron.

[0031] SEQ ID NOs:23-29 are exemplary cytosine deaminase sequences useful with this invention.

[0032] SEQ ID NOs:30-40 are exemplary adenine deaminase amino acid sequences useful with this invention.

[0033] SEQ ID NO:41 is an exemplary uracil-DNA glycosylase inhibitor (UGI) sequences useful with this invention.

[0034] SEQ ID NOs:42-44 provides an example of a protospacer adjacent motif position for a Type V CRISPR-Cas12a nuclease.

[0035] SEQ ID NOs:45-47 provide example peptide tags and affinity polypeptides useful with this invention.

[0036] SEQ ID NOs:48-58 provide example RNA recruiting motifs and corresponding affinity polypeptides useful with this invention.

[0037] SEQ ID NOs:59-60 are exemplary Cas9 polypeptide sequences useful with this invention.

[0038] SEQ ID NOs:61-71 are exemplary Cas9 polynucleotide sequences useful with this invention.

[0039] SEQ ID NO:72 is an example UPL3a genomic sequence from soybean.

[0040] SEQ ID NO:73 is an example UPL3b genomic sequence from soybean.

[0041] SEQ ID NO:74 is an example UPL3c genomic sequence from soybean.

[0042] SEQ ID NO:75 is an example UPL3d genomic sequence from soybean.

[0043] SEQ ID NO:76 is an example UPL3a genomic sequence from corn.

[0044] SEQ ID NO:77 is an example UPL3b genomic sequence from corn.

[0045] SEQ ID NO:78 is an example UPL3a polypeptide sequence from soybean.

[0046] SEQ ID NO:79 is an example UPL3b polypeptide sequence from soybean.

[0047] SEQ ID NO:80 is an example UPL3c polypeptide sequence from soybean.

[0048] SEQ ID NO:81 is an example UPL3d polypeptide sequence from soybean.

[0049] SEQ ID NO:82 is an example UPL3a polypeptide sequence from corn.

[0050] SEQ ID NO:83 is an example UPL3b polypeptide sequence from corn.

[0051] SEQ ID NOs:84-93 are example portions or regions of UPL3 polypeptide sequences.

[0052] SEQ ID NOs:94-118 are example spacer sequences for nucleic acid guides useful with this invention.

[0053] SEQ ID NOs:119-121 are example edited soybean sequences.

[0054] SEQ ID NOs:122-125 are example edited corn sequences.

[0055] SEQ ID NO:126 and 127 are deleted portions of edited soybean sequences, SEQ ID NO:120 and SEQ ID NO:121, respectively.

[0056] SEQ ID NO: 128 is a deleted portion of edited corn sequence, SEQ ID NO:124.

### DETAILED DESCRIPTION

[0057] The present invention now will be described hereinafter with reference to the accompanying examples, in which embodiments of the invention are shown. This description is not intended to be a detailed catalog of all the different ways in which the invention may be implemented, or all the features that may be added to the instant invention. For example, features illustrated with respect to one embodiment may be incorporated into other embodiments, and features illustrated with respect to a particular embodiment may be deleted from that embodiment. Thus, the invention contemplates that in some embodiments of the invention, any feature or combination of features set forth herein can be excluded or omitted. In addition, numerous variations and additions to the various embodiments suggested herein will be apparent to those skilled in the art in light of the instant disclosure, which do not depart from the instant invention. Hence, the following descriptions are intended to illustrate some particular embodiments of the invention, and not to exhaustively specify all permutations, combinations and variations thereof.

[0058] Unless otherwise defined, all technical and scientific terms used herein have the same meaning as commonly understood by one of ordinary skill in the art to which this invention belongs. The terminology used in the description of the invention herein is for the purpose of describing particular embodiments only and is not intended to be limiting of the invention.

[0059] All publications, patent applications, patents and other references cited herein are incorporated by reference in their entireties for the teachings relevant to the sentence and/or paragraph in which the reference is presented.

[0060] Unless the context indicates otherwise, it is specifically intended that the various features of the invention described herein can be used in any combination. Moreover, the present invention also contemplates that in some embodiments of the invention, any feature or combination of features set forth herein can be excluded or omitted. To illustrate, if the specification states that a composition comprises components A, B and C, it is specifically intended that any of A, B or C, or a combination thereof, can be omitted and disclaimed singularly or in any combination.

[0061] As used in the description of the invention and the appended claims, the singular forms “a,” “an” and “the” are intended to include the plural forms as well, unless the context clearly indicates otherwise.

[0062] Also as used herein, “and/or” refers to and encompasses any and all possible combinations of one or more of the associated listed items, as well as the lack of combinations when interpreted in the alternative (“or”).

[0063] The term “about,” as used herein when referring to a measurable value such as an amount or concentration and the like, is meant to encompass variations of ±10%, ±5%, ±1%, ±0.5%, or even ±0.1% of the specified value as well as the specified value. For example, “about X” where X is the measurable value, is meant to include X as well as variations of ±10%, ±5%, ±1%, ±0.5%, or even ±0.1% of X. A range provided herein for a measurable value may include any other range and/or individual value therein.

[0064] As used herein, phrases such as “between X and Y” and “between about X and Y” should be interpreted to include X and Y. As used herein, phrases such as “between about X and Y” mean “between about X and about Y” and phrases such as “from about X to Y” mean “from about X to about Y.”

[0065] Recitation of ranges of values herein are merely intended to serve as a shorthand method of referring individually to each separate value falling within the range, unless otherwise indicated herein, and each separate value is incorporated into the specification as if it were individually recited herein. For example, if the range 10 to 15 is disclosed, then 11, 12, 13, and 14 are also disclosed.

[0066] The term “comprise,” “comprises” and “comprising” as used herein, specify the presence of the stated features, integers, steps, operations, elements, and/or components, but do not preclude the presence or addition of one or more other features, integers, steps, operations, elements, components, and/or groups thereof.

[0067] As used herein, the transitional phrase “consisting essentially of” means that the scope of a claim is to be interpreted to encompass the specified materials or steps recited in the claim and those that do not materially affect the basic and novel characteristic(s) of the claimed invention. Thus, the term “consisting essentially of” when used in a claim of this invention is not intended to be interpreted to be equivalent to “comprising.”

[0068] As used herein, the terms “increase,” “increasing,” “increased,” “enhance,” “enhanced,” “enhancing,” and “enhancement” (and grammatical variations thereof) describe an elevation of at least about 5%, 10%, 15%, 20%, 25%, 50%, 75%, 100%, 150%, 200%, 300%, 400%, 500% or more as compared to a control. For example, a plant comprising a mutation in a HECT E3 UBL gene as described herein can exhibit an improved yield trait (e.g., one or more improved yield traits; e.g., optionally increased seed size (e.g., seed area and/or seed weight) and/or increased seed oil content and) that is at least about 5% or greater than that of a control plant not comprising the same mutation. A control plant is typically the same plant as the edited plant, but the control plant has not been similarly edited and therefore is devoid of the mutation. A control plant maybe an isogenic plant and/or a wild type plant. Thus, a control plant can be the same breeding line, variety, or cultivar as the subject plant into which a mutation as described herein is introgressed, but the control breeding line, variety, or cultivar is free of the mutation. In some embodiments, a comparison between a plant of the invention and a control plant is made under the same growth conditions, e.g., the same environmental conditions (soil, hydration, light, heat, nutrients, and the like).

[0069] As used herein, the terms “reduce,” “reduced,” “reducing,” “reduction,” “diminish,” and “decrease” (and grammatical variations thereof), describe, for example, a decrease of at least about 5%, 10%, 15%, 20%, 25%, 35%, 50%, 75%, 80%, 85%, 90%, 95%, 96%, 97%, 98%, 99%, 99.5%, 99.6%, 99.7%, 99.8%, 99.9%, or 100% as compared to a control. In particular embodiments, the reduction can result in no or essentially no (i.e., an insignificant amount, e.g., less than about 10% or even 5%) detectable activity or amount.

[0070] As used herein, the terms “express,” “expresses,” “expressed” or “expression,” and the like, with respect to a nucleic acid molecule and/or a nucleotide sequence (e.g., RNA or DNA) indicates that the nucleic acid molecule and/or a nucleotide sequence is transcribed and, optionally, translated. Thus, a nucleic acid molecule and/or a nucleotide sequence may express a polypeptide of interest or, for example, a functional untranslated RNA.

[0071] A “heterologous” or a “recombinant” nucleotide sequence is a nucleotide sequence not naturally associated with a host cell into which it is introduced, including non-naturally occurring multiple copies of a naturally occurring nucleotide sequence. A “heterologous” nucleotide/polypeptide may originate from a foreign species, or, if from the same species, is substantially modified from its native form in composition and/or genomic locus by deliberate human intervention.

[0072] A “native” or “wild type” nucleic acid, nucleotide sequence, polypeptide or amino acid sequence refers to a naturally occurring or endogenous nucleic acid, nucleotide sequence, polypeptide or amino acid sequence. In some contexts, a “wild type” nucleic acid is a nucleic acid that is not edited as described herein and can differ from an “endogenous” gene that may be edited as described herein (e.g., a mutated endogenous gene). In some contexts, a “wild type” nucleic acid (e.g., unedited) may be heterologous to the organism in which the wild type nucleic acid is found (e.g., a transgenic organism). As an example, a “wild type endogenous Homologous to E6AP C-Terminus (HECT) E3 Ubiquitin Protein Ligase (UPL) (HECT E3 UPL) gene” is a HECT E3 UPL gene, optionally a UPL3a gene, a UPL3b gene, a UPL3c gene, and/or a UPL3d gene, that is naturally occurring in or endogenous to the reference organism, e.g., a plant, e.g., a soybean plant, a maize plant, and may be subject to modification as described herein, after which, such a modified endogenous gene is no longer wild type.

[0073] As used herein, the term “heterozygous” refers to a genetic status wherein different alleles reside at corresponding loci on homologous chromosomes.

[0074] As used herein, the term “homozygous” refers to a genetic status wherein identical alleles reside at corresponding loci on homologous chromosomes.

[0075] As used herein, the term “allele” refers to one of two or more different nucleotides or nucleotide sequences that occur at a specific locus.

[0076] A “null allele” is a nonfunctional allele caused by a genetic mutation that results in a complete lack of production of the corresponding protein or produces a protein that is non-functional.

[0077] A “dominant negative mutation” is a mutation that produces an altered gene product (e.g., having an aberrant function relative to wild type), which gene product adversely affects the function of the wild-type allele or gene product. For example, a “dominant negative mutation” may block a function of the wild type gene product. A dominant negative mutation may also be referred to as an “antimorphic mutation.”

[0078] A “semi-dominant mutation” refers to a mutation in which the penetrance of the phenotype in a heterozygous organism is less than that observed for a homozygous organism.

[0079] A “weak loss-of-function mutation” is a mutation that results in a gene product having partial function or reduced function (partially inactivated) as compared to the wildtype gene product.

[0080] A “hypomorphic mutation” is a mutation that results in a partial loss of gene function, which may occur through reduced expression (e.g., reduced protein and/or reduced RNA) or reduced functional performance (e.g., reduced activity), hut not a complete loss of function/activity. A “hypomorphic” allele is a semi-functional allele caused by a genetic mutation that results in production of the corresponding protein that functions at anywhere between 1% and 99% of normal efficiency.

[0081] A “hypermorphic mutation” is a mutation that results in increased expression of e gene product and/or increased activity of the gene product.

[0082] A “locus” is a position on a chromosome where a gene or marker or allele is located. In some embodiments, a locus may encompass one or more nucleotides.

[0083] As used herein, the terms “desired allele,” “target allele” and/or “allele of interest” are used interchangeably to refer to an allele associated with a desired trait. In some embodiments, a desired allele may be associated with either an increase or a decrease (relative to a control) of or in a given trait, depending on the nature of the desired phenotype.

[0084] A marker is “associated with” a trait when said trait is linked to it and when the presence of the marker is an indicator of whether and/or to what extent the desired trait or trait form will occur in a plant/germplasm comprising the marker. Similarly, a marker is “associated with” an allele or chromosome interval when it is linked to it and when the presence of the marker is an indicator of whether the allele or chromosome interval is present in a plant/germplasm comprising the marker.

[0085] As used herein, the terms “backcross” and “backcrossing” refer to the process whereby a progeny plant is crossed back to one of its parents one or more times (e.g., 1, 2, 3, 4, 5, 6, 7, 8, etc.). In a backcrossing scheme, the “donor” parent refers to the parental plant with the desired gene or locus to be introgressed. The “recipient” parent (used one or more times) or “recurrent” parent (used two or more times) refers to the parental plant into which the gene or locus is being introgressed. For example, see Ragot, M. et al. Marker-assisted Backcrossing: A Practical Example, in TECHNIQUES ET UTILISATIONS DES MARQUEURS MOLECULAIRES LES COLLOQUES, Vol. 72, pp. 45-56 (1995); and Openshaw et al., Marker-assisted Selection in Backcross Breeding, in PROCEEDINGS OF THE SYMPOSIUM “ANALYSIS OF MOLECULAR MARKER DATA,” pp. 41-43 (1994). The initial cross gives rise to the F1 generation. The term “BC1” refers to the second use of the recurrent parent, “BC2” refers to the third use of the recurrent parent, and so on.

[0086] As used herein, the terms “cross” or “crossed” refer to the fusion of gametes via pollination to produce progeny (e.g., cells, seeds or plants). The term encompasses both sexual crosses (the pollination of one plant by another) and selfing (self-pollination, e.g., when the pollen and ovule are from the same plant). The term “crossing” refers to the act of fusing gametes via pollination to produce progeny.

[0087] As used herein, the terms “introgression,” “introgressing” and “introgressed” refer to both the natural and artificial transmission of a desired allele or combination of desired alleles of a genetic locus or genetic loci from one genetic background to another. For example, a desired allele at a specified locus can be transmitted to at least one (e.g., one or more) progeny via a sexual cross between two parents of the same species, where at least one of the parents has the desired allele in its genome. Alternatively, for example, transmission of an allele can occur by recombination between two donor genomes, e.g., in a fused protoplast, where at least one of the donor protoplasts has the desired allele in its genome. The desired allele may be a selected allele of a marker, a QTL, a transgene, or the like. Offspring comprising the desired allele can be backcrossed one or more times (e.g., 1, 2, 3, 4, or more times) to a line having a desired genetic background, selecting for the desired allele, with the result being that the desired allele becomes fixed in the desired genetic background. For example, a marker associated with increased yield under non-water stress conditions may be introgressed from a donor into a recurrent parent that does not comprise the marker and does not exhibit increased yield under non-water stress conditions. The resulting offspring could then be backcrossed one or more times and selected until the progeny possess the genetic marker(s) associated with increased yield under non-water stress conditions in the recurrent parent background.

[0088] A “genetic map” is a description of genetic linkage relationships among loci on one or more chromosomes within a given species, generally depicted in a diagrammatic or tabular form. For each genetic map, distances between loci are measured by the recombination frequencies between them. Recombination between loci can be detected using a variety of markers. A genetic map is a product of the mapping population, types of markers used, and the polymorphic potential of each marker between different populations. The order and genetic distances between loci can differ from one genetic map to another.

[0089] As used herein, the term “genotype” refers to the genetic constitution of an individual (or group of individuals) at one or more genetic loci, as contrasted with the observable and/or detectable and/or manifested trait (the phenotype). Genotype is defined by the allele(s) of one or more known loci that the individual has inherited from its parents. The term genotype can be used to refer to an individual's genetic constitution at a single locus, at multiple loci, or more generally, the term genotype can be used to refer to an individual's genetic make-up for all the genes in its genome. Genotypes can be indirectly characterized, e.g., using markers and/or directly characterized by nucleic acid sequencing.

[0090] As used herein, the term “germplasm” refers to genetic material of or from an individual (e.g., a plant), a group of individuals (e.g., a plant line, variety or family), or a clone derived from a line, variety, species, or culture. The germplasm can be part of an organism or cell or can be separate from the organism or cell. In general, germplasm provides genetic material with a specific genetic makeup that provides a foundation for some or all of the hereditary qualities of an organism or cell culture. As used herein, germplasm includes cells, seed or tissues from which new plants may be grown, as well as plant parts that can be cultured into a whole plant (e.g., leaves, stems, buds, roots, pollen, cells, etc.).

[0091] As used herein, the terms “cultivar” and “variety” refer to a group of similar plants that by structural or genetic features and/or performance can be distinguished from other varieties within the same species.

[0092] As used herein, the terms “exotic,” “exotic line” and “exotic germplasm” refer to any plant, line or germplasm that is not elite. In general, exotic plants/germplasms are not derived from any known elite plant or germplasm, but rather are selected to introduce one or more desired genetic elements into a breeding program (e.g., to introduce novel alleles into a breeding program).

[0093] As used herein, the term “hybrid” in the context of plant breeding refers to a plant that is the offspring of genetically dissimilar parents produced by crossing plants of different lines or breeds or species, including but not limited to the cross between two inbred lines.

[0094] As used herein, the term “inbred” refers to a substantially homozygous plant or variety. The term may refer to a plant or plant variety that is substantially homozygous throughout the entire genome or that is substantially homozygous with respect to a portion of the genome that is of particular interest.

[0095] A “haplotype” is the genotype of an individual at a plurality of genetic loci, i.e., a combination of alleles. Typically, the genetic loci that define a haplotype are physically and genetically linked, i.e., on the same chromosome segment. The term “haplotype” can refer to polymorphisms at a particular locus, such as a single marker locus, or polymorphisms at multiple loci along a chromosomal segment.

[0096] As used herein, the term “heterologous” refers to a nucleotide/polypeptide that originates from a foreign species, or, if from the same species, is substantially modified from its native form in composition and/or genomic locus by deliberate human intervention.

[0097] A plant in which at least one (e.g., one or more, e.g., 1, 2, 3, or 4, or more) HECT E3 UBL gene (e.g., one or more HECT E3 UBL genes; e.g., one or more HECT E3 UBL3 genes) is modified as described herein (e.g., comprises a modification as described herein) may have improved yield traits as compared to a plant that does not comprise the modification in the at least one HECT E3 UBL gene. As used herein, “improved yield traits” refers to any plant trait associated with growth, for example, biomass, yield, nitrogen use efficiency (NUE), inflorescence size/weight, fruit yield, fruit quality, fruit size, seed size (e.g., seed area, seed size), seed number, foliar tissue weight, nodulation number, nodulation mass, nodulation activity, number of seed heads, number of tillers, number of branches, number of flowers, number of tubers, tuber mass, bulb mass, number of seeds, total seed mass, rate of leaf emergence, rate of tiller/branch emergence, rate of seedling emergence, length of roots, number of roots, size and/or weight of root mass, or any combination thereof. Thus, in some aspects, “improved yield traits” may include, but is not limited to, increased inflorescence production, increased fruit production (e.g., increased number, weight and/or size of fruit; e.g., increase number, weight, and/or size of ears for, e.g., maize), increased fruit quality, increased number, size and/or weight of roots, increased meristem size, increased seed size (e.g., seed area and/or seed weight), increased biomass, increased leaf size, increased nitrogen use efficiency, increased height, increased internode number and/or increased internode length as compared to a control plant or part thereof (e.g., a plant that does not comprise a mutated endogenous HECT E3 UBL nucleic acid (e.g., a mutated HECT E3 UBL gene)). Improved yield traits can also result from increased planting density of plants of the invention. Thus, in some aspects, a plant of the invention is capable of being planted at an increased density (as a consequence of altered plant architecture resulting from the endogenous mutation), which results in improved yield traits as compared to a control plant that is planted at the same density. In some aspects, improved yield traits can be expressed as quantity of grain produced per area of land (e.g., bushels per acre of land). In some embodiments, improved yield traits includes, but is not limited to, increased seed size (e.g., seed area and/or seed weight) and/or increased seed oil content.

[0098] As used herein, an “increased seed size” can mean a seed that is increased in area. In some embodiments, an seed may be increased in area by up to about 70% (e.g., about 1, 2, 3, 4, 5, 6, 7, 8, 9, 10, 11, 12, 13, 14, 15, 16, 17, 18, 19, 20, 21, 22, 23, 24, 25, 26, 27, 28, 29, 30, 31, 32, 33, 34, 35, 36, 37, 38, 39, 40, 41, 42, 43, 44, 45, 45, 46, 47, 48, 49, 50, 51, 52, 53, 54, 55, 56, 57, 58, 59, 60, 61, 62, 63, 64, 65, 66, 67, 68, 69, 70%) as compared to a seed from a control plant (e.g., a plant not comprising the mutation in an endogenous HECT E3 UBL gene as described herein). In some embodiments, an seed may be increased in weight by up to about 50% (e.g., about 1, 2, 3, 4, 5, 6, 7, 8, 9, 10, 11, 12, 13, 14, 15, 16, 17, 18, 19, 20, 21, 22, 23, 24, 25, 26, 27, 28, 29, 30, 31, 32, 33, 34, 35, 36, 37, 38, 39, 40, 41, 42, 43, 44, 45, 45, 46, 47, 48, 49, or 50%) as compared to a seed from a control plant (e.g., a plant not comprising the mutation in an endogenous HECT E3 UBL gene as described herein). In some embodiments, an increase in seed size can include an increase in both seed area and seed size.

[0099] As used herein an “increase in seed oil content” refers to a seed that is increased in oil/lipid content by about 30% (e.g., about 1, 2, 3, 4, 5, 6, 7, 8, 9, 10, 11, 12, 13, 14, 15, 16, 17, 18, 19, 20, 21, 22, 23, 24, 25, 26, 27, 28, 29, or 30%) as compared to a seed from a control plant (e.g., a plant not comprising the mutation in an endogenous HECT E3 UBL gene as described herein). In some embodiments, a seed having an increase in seed oil content may also be increased in size (e.g., increased in seed area and/or seed weight).

[0100] As used herein a “control plant” means a plant that does not contain an edited HECT E3 UBL gene or genes as described herein that imparts an enhanced/improved trait (e.g., yield trait) or altered phenotype. A control plant is used to identify and select a plant edited as described herein and that has an enhanced trait or altered phenotype as compared to the control plant. A suitable control plant can be a plant of the parental line used to generate a plant comprising a mutated HECT E3 UBL gene(s), for example, a wild type plant devoid of an edit in an endogenous HECT E3 UBL gene as described herein. A suitable control plant can also be a plant that contains recombinant nucleic acids that impart other traits, for example, a transgenic plant having enhanced herbicide tolerance. A suitable control plant can in some cases be a progeny of a heterozygous or hemizygous transgenic plant line that is devoid of the mutated HECT E3 UBL gene as described herein, known as a negative segregant, or a negative isogenic line.

[0101] An enhanced trait (e.g., improved yield trait) may be, for example, decreased days from planting to maturity, increased stalk size, increased number of leaves, increased plant height growth rate in vegetative stage, increased ear size, increased ear dry weight per plant, increased number of kernels per ear, increased weight per kernel, increased number of kernels per plant, decreased ear void, extended grain fill period, reduced plant height, increased number of root branches, increased total root length, increased yield, increased nitrogen use efficiency, and increased water use efficiency as compared to a control plant. An altered phenotype may be, for example, plant height, biomass, canopy area, anthocyanin content, chlorophyll content, water applied, water content, and water use efficiency.

[0102] As used herein a “trait” is a physiological, morphological, biochemical, or physical characteristic of a plant or particular plant material or cell. In some instances, this characteristic is visible to the human eye and can be measured mechanically, such as seed or plant size, weight, shape, form, length, height, growth rate and development stage, or can be measured by biochemical techniques, such as detecting the protein, starch, certain metabolites, or oil content of seed or leaves, or by observation of a metabolic or physiological process, for example, by measuring tolerance to water deprivation or particular salt or sugar concentrations, or by the measurement of the expression level of a gene or genes, for example, by employing Northern analysis, RT-PCR, microarray gene expression assays, or reporter gene expression systems, or by agricultural observations such as hyperosmotic stress tolerance or yield. However, any technique can be used to measure the amount of, the comparative level of, or the difference in any selected chemical compound or macromolecule in the transgenic plants.

[0103] As used herein an “enhanced trait” means a characteristic of a plant resulting from mutations in a HECT E3 UBL gene(s) as described herein. Such traits include, but are not limited to, an enhanced agronomic trait characterized by enhanced plant morphology, physiology, growth and development, yield, nutritional enhancement, disease or pest resistance, or environmental or chemical tolerance. In some embodiments, an enhanced trait/altered phenotype may be, for example, decreased days from planting to maturity, increased stalk size, increased number of leaves, increased plant height growth rate in vegetative stage, increased ear size, increased ear dry weight per plant, increased number of kernels per ear, increased weight per kernel, increased number of kernels per plant, decreased ear void, extended grain fill period, reduced plant height, increased number of root branches, increased total root length, drought tolerance, increased water use efficiency, cold tolerance, increased nitrogen use efficiency, and increased yield. In some embodiments, a trait is increased yield under nonstress conditions or increased yield under environmental stress conditions. Stress conditions can include both biotic and abiotic stress, for example, drought, shade, fungal disease, viral disease, bacterial disease, insect infestation, nematode infestation, cold temperature exposure, heat exposure, osmotic stress, reduced nitrogen nutrient availability, reduced phosphorus nutrient availability and high plant density. “Yield” can be affected by many properties including without limitation, plant height, plant biomass, pod number, pod position on the plant, number of internodes, incidence of pod shatter, grain size, ear size, ear tip filling, kernel abortion, efficiency of nodulation and nitrogen fixation, efficiency of nutrient assimilation, resistance to biotic and abiotic stress, carbon assimilation, plant architecture, resistance to lodging, percent seed germination, seedling vigor, and juvenile traits. Yield can also be affected by efficiency of germination (including germination in stressed conditions), growth rate (including growth rate in stressed conditions), flowering time and duration, ear number, ear size, ear weight, seed number per ear or pod, seed size, composition of seed (starch, oil, protein) and characteristics of seed fill.

[0104] Also used herein, the term “trait modification” encompasses altering the naturally occurring trait by producing a detectable difference in a characteristic in a plant comprising a mutation in an endogenous HECT E3 UBL gene as described herein relative to a plant not comprising the mutation, such as a wild-type plant, or a negative segregant. In some cases, the trait modification can be evaluated quantitatively. For example, the trait modification can entail an increase or decrease in an observed trait characteristics or phenotype as compared to a control plant. It is known that there can be natural variations in a modified trait. Therefore, the trait modification observed entails a change of the normal distribution and magnitude of the trait characteristics or phenotype in the plants as compared to a control plant.

[0105] The present disclosure relates to a plant with improved economically relevant characteristics, more specifically increased yield. More specifically the present disclosure relates to a plant comprising a mutation(s) in a HECT E3 UBL gene(s) as described herein (e.g., HECT E3 UBL3 genes), wherein the plant has increased yield as compared to a control plant devoid of said mutation(s). In some embodiments, plants produced as described herein exhibit increased yield or improved yield trait components as compared to a control plant. In some embodiments, a plant of the present disclosure exhibits an improved trait that is related to yield, including but not limited to increased nitrogen use efficiency, increased nitrogen stress tolerance, increased water use efficiency and increased drought tolerance, as defined and discussed infra.

[0106] Yield can be defined as the measurable produce of economic value from a crop. Yield can be defined in the scope of quantity and/or quality. Yield can be directly dependent on several factors, for example, the number and size of organs, plant architecture (such as the number of branches, plant biomass, e.g., increased root biomass, steeper root angle and/or longer roots, and the like), flowering time and duration, grain fill period. Root architecture and development, photosynthetic efficiency, nutrient uptake, stress tolerance, early vigor, delayed senescence and functional stay green phenotypes may be factors in determining yield. Optimizing the above-mentioned factors can therefore contribute to increasing crop yield.

[0107] Reference herein to an increase/improvement in yield-related traits can also be taken to mean an increase in biomass (weight) of one or more parts of a plant, which can include above ground and/or below ground (harvestable) plant parts. In particular, such harvestable parts are seeds, and performance of the methods of the disclosure results in plants with increased yield and in particular increased seed yield relative to the seed yield of suitable control plants. The term “yield” of a plant can relate to vegetative biomass (root and/or shoot biomass), to reproductive organs, and/or to propagules (such as seeds) of that plant.

[0108] Increased yield of a plant of the present disclosure can be measured in a number of ways, including test weight, seed number per plant, seed weight, seed number per unit area (for example, seeds, or weight of seeds, per acre), bushels per acre, tons per acre, or kilo per hectare. Increased yield can result from improved utilization of key biochemical compounds, such as nitrogen, phosphorous and carbohydrate, or from improved responses to environmental stresses, such as cold, heat, drought, salt, shade, high plant density, and attack by pests or pathogens.

[0109] “Increased yield” can manifest as one or more of the following: (i) increased plant biomass (weight) of one or more parts of a plant, particularly aboveground (harvestable) parts, of a plant, increased root biomass (increased number of roots, increased root thickness, increased root length) or increased biomass of any other harvestable part; or (ii) increased early vigor, defined herein as an improved seedling aboveground area approximately three weeks post-germination.

[0110] “Early vigor” refers to active healthy plant growth especially during early stages of plant growth, and can result from increased plant fitness due to, for example, the plants being better adapted to their environment (for example, optimizing the use of energy resources, uptake of nutrients and partitioning carbon allocation between shoot and root). Early vigor, for example, can be a combination of the ability of seeds to germinate and emerge after planting and the ability of the young plants to grow and develop after emergence. Plants having early vigor also show increased seedling survival and better establishment of the crop, which often results in highly uniform fields with the majority of the plants reaching the various stages of development at substantially the same time, which often results in increased yield. Therefore, early vigor can be determined by measuring various factors, such as kernel weight, percentage germination, percentage emergence, seedling growth, seedling height, root length, root and shoot biomass, canopy size and color and others.

[0111] Further, increased yield can also manifest as increased total seed yield, which may result from one or more of an increase in seed biomass (seed weight) due to an increase in the seed weight on a per plant and/or on an individual seed basis an increased number of, for example, flowers/panicles per plant; an increased number of pods; an increased number of nodes; an increased number of flowers (“florets”) per panicle/plant; increased seed fill rate; an increased number of filled seeds; increased seed size (length, width, area, perimeter, and/or weight), which can also influence the composition of seeds; and/or increased seed volume, which can also influence the composition of seeds. In one embodiment, increased yield can be increased seed yield, for example, increased seed weight; increased number of filled seeds; and increased harvest index.

[0112] Increased yield can also result in modified architecture, or can occur because of modified plant architecture.

[0113] Increased yield can also manifest as increased harvest index, which is expressed as a ratio of the yield of harvestable parts, such as seeds, over the total biomass

[0114] The disclosure also extends to harvestable parts of a plant such as, but not limited to, seeds, leaves, fruits, flowers, bolls, pods, siliques, nuts, stems, rhizomes, tubers and bulbs. The disclosure furthermore relates to products derived from a harvestable part of such a plant, such as dry pellets, powders, oil, fat and fatty acids, starch or proteins.

[0115] The present disclosure provides a method for increasing “yield” of a plant or “broad acre yield” of a plant or plant part defined as the harvestable plant parts per unit area, for example seeds, or weight of seeds, per acre, pounds per acre, bushels per acre, tones per acre, tons per acre, kilo per hectare.

[0116] As used herein “nitrogen use efficiency” refers to the processes which lead to an increase in the plant's yield, biomass, vigor, and growth rate per nitrogen unit applied. The processes can include the uptake, assimilation, accumulation, signaling, sensing, retranslocation (within the plant) and use of nitrogen by the plant.

[0117] As used herein “increased nitrogen use efficiency” refers to the ability of plants to grow, develop, or yield faster or better than normal when subjected to the same amount of available/applied nitrogen as under normal or standard conditions; ability of plants to grow, develop, or yield normally, or grow, develop, or yield faster or better when subjected to less than optimal amounts of available/applied nitrogen, or under nitrogen limiting conditions.

[0118] As used herein “nitrogen limiting conditions” refers to growth conditions or environments that provide less than optimal amounts of nitrogen needed for adequate or successful plant metabolism, growth, reproductive success and/or viability.

[0119] As used herein the “increased nitrogen stress tolerance” refers to the ability of plants to grow, develop, or yield normally, or grow, develop, or yield faster or better when subjected to less than optimal amounts of available/applied nitrogen, or under nitrogen limiting conditions.

[0120] Increased plant nitrogen use efficiency can be translated in the field into either harvesting similar quantities of yield, while supplying less nitrogen, or increased yield gained by supplying optimal/sufficient amounts of nitrogen. The increased nitrogen use efficiency can improve plant nitrogen stress tolerance and can also improve crop quality and biochemical constituents of the seed such as protein yield and oil yield. The terms “increased nitrogen use efficiency”, “enhanced nitrogen use efficiency”, and “nitrogen stress tolerance” are used inter-changeably in the present disclosure to refer to plants with improved productivity under nitrogen limiting conditions.

[0121] As used herein “water use efficiency” refers to the amount of carbon dioxide assimilated by leaves per unit of water vapor transpired. It constitutes one of the most important traits controlling plant productivity in dry environments. “Drought tolerance” refers to the degree to which a plant is adapted to arid or drought conditions. The physiological responses of plants to a deficit of water include leaf wilting, a reduction in leaf area, leaf abscission, and the stimulation of root growth by directing nutrients to the underground parts of the plants. Typically, plants are more susceptible to drought during flowering and seed development (the reproductive stages), as plant's resources are deviated to support root growth. In addition, abscisic acid (ABA), a plant stress hormone, induces the closure of leaf stomata (microscopic pores involved in gas exchange), thereby reducing water loss through transpiration, and decreasing the rate of photosynthesis. These responses improve the water-use efficiency of the plant on the short term. The terms “increased water use efficiency”, “enhanced water use efficiency”, and “increased drought tolerance” are used inter-changeably in the present disclosure to refer to plants with improved productivity under water-limiting conditions.

[0122] As used herein “increased water use efficiency” refers to the ability of plants to grow, develop, or yield faster or better than normal when subjected to the same amount of available/applied water as under normal or standard conditions; ability of plants to grow, develop, or yield normally, or grow, develop, or yield faster or better when subjected to reduced amounts of available/applied water (water input) or under conditions of water stress or water deficit stress.

[0123] As used herein “increased drought tolerance” refers to the ability of plants to grow, develop, or yield normally, or grow, develop, or yield faster or better than normal when subjected to reduced amounts of available/applied water and/or under conditions of acute or chronic drought; ability of plants to grow, develop, or yield normally when subjected to reduced amounts of available/applied water (water input) or under conditions of water deficit stress or under conditions of acute or chronic drought.

[0124] As used herein, “drought stress” refers to a period of dryness (acute or chronic/prolonged) that results in water deficit and subjects plants to stress and/or damage to plant tissues and/or negatively affects grain/crop yield; a period of dryness (acute or chronic/prolonged) that results in water deficit and/or higher temperatures and subjects plants to stress and/or damage to plant tissues and/or negatively affects grain/crop yield.

[0125] As used herein, “water deficit” refers to the conditions or environments that provide less than optimal amounts of water needed for adequate/successful growth and development of plants.

[0126] As used herein, “water stress” refers to the conditions or environments that provide improper (either less/insufficient or more/excessive) amounts of water than that needed for adequate/successful growth and development of plants/crops thereby subjecting the plants to stress and/or damage to plant tissues and/or negatively affecting grain/crop yield.

[0127] As used herein “water deficit stress” refers to the conditions or environments that provide less/insufficient amounts of water than that needed for adequate/successful growth and development of plants/crops thereby subjecting the plants to stress and/or damage to plant tissues and/or negatively affecting grain yield.

[0128] As used herein, the terms “nucleic acid,” “nucleic acid molecule,” “nucleotide sequence” and “polynucleotide” refer to RNA or DNA that is linear or branched, single or double stranded, or a hybrid thereof. The term also encompasses RNA/DNA hybrids. When dsRNA is produced synthetically, less common bases, such as inosine, 5-methylcytosine, 6-methyladenine, hypoxanthine and others can also be used for antisense, dsRNA, and ribozyme pairing. For example, polynucleotides that contain C-5 propyne analogues of uridine and cytidine have been shown to bind RNA with high affinity and to be potent antisense inhibitors of gene expression. Other modifications, such as modification to the phosphodiester backbone, or the 2′-hydroxy in the ribose sugar group of the RNA can also be made.

[0129] As used herein, the term “nucleotide sequence” refers to a heteropolymer of nucleotides or the sequence of these nucleotides from the 5′ to 3′ end of a nucleic acid molecule and includes DNA or RNA molecules, including cDNA, a DNA fragment or portion, genomic DNA, synthetic (e.g., chemically synthesized) DNA, plasmid DNA, mRNA, and anti-sense RNA, any of which can be single stranded or double stranded. The terms “nucleotide sequence” “nucleic acid,” “nucleic acid molecule,” “nucleic acid construct,” “oligonucleotide” and “polynucleotide” are also used interchangeably herein to refer to a heteropolymer of nucleotides. Nucleic acid molecules and/or nucleotide sequences provided herein are presented herein in the 5′ to 3′ direction, from left to right and are represented using the standard code for representing the nucleotide characters as set forth in the U.S. sequence rules, 37 CFR §§ 1.821-1.825 and the World Intellectual Property Organization (WIPO) Standard ST.25. A “5′ region” as used herein can mean the region of a polynucleotide that is nearest the 5′ end of the polynucleotide. Thus, for example, an element in the 5′ region of a polynucleotide can be located anywhere from the first nucleotide located at the 5′ end of the polynucleotide to the nucleotide located halfway through the polynucleotide. A “3′ region” as used herein can mean the region of a polynucleotide that is nearest the 3′ end of the polynucleotide. Thus, for example, an element in the 3′ region of a polynucleotide can be located anywhere from the first nucleotide located at the 3′ end of the polynucleotide to the nucleotide located halfway through the polynucleotide.

[0130] As used herein with respect to nucleic acids, the term “fragment” or “portion” refers to a nucleic acid that is reduced in length relative (e.g., reduced by 1, 2, 3, 4, 5, 6, 7, 8, 9, 10, 11, 12, 13, 14, 15, 16, 17, 18, 19, 20, 20, 40, 50, 60, 70, 80, 90, 100, 110, 120, 130, 140, 150, 160, 170, 180, 190, 200, 210, 220, 230, 240, 250, 260, 270, 280, 290, 300, 310, 320, 330, 340, 350, 400, 450, 500, 550, 600, 650, 700, 750, 800, 850, or 900 or more nucleotides or any range or value therein) to a reference nucleic acid and that comprises, consists essentially of and/or consists of a nucleotide sequence of contiguous nucleotides identical or almost identical (e.g., 70%, 71%, 72%, 73%, 74%, 75%, 76%, 77%, 78%, 79%, 80%, 81%, 82%, 83%, 84%, 85%, 86%, 87%, 88%, 89%, 90%, 91%, 92%, 93%, 94%, 95%, 96%, 97%, 98%, 99% identical) to a corresponding portion of the reference nucleic acid. Such a nucleic acid fragment may be, where appropriate, included in a larger polynucleotide of which it is a constituent. As an example, a repeat sequence of guide nucleic acid of this invention may comprise a “portion” of a wild type CRISPR-Cas repeat sequence (e.g., a wild type CRISR-Cas repeat; e.g., a repeat from the CRISPR Cas system of, for example, a Cas9, Cas12a (Cpf1), Cas12b, Cas12c (C2c3), Cas12d (CasY), Cas12e (CasX), Cas12g, Cas12h, Cas12i, C2c4, C2c5, C2c8, C2c9, C2c10, Cas14a, Cas14b, and/or a Cas14c, and the like).

[0131] In some embodiments, a nucleic acid fragment may comprise, consist essentially of or consist of about 5, 6, 7, 8, 9, 10, 11, 12, 13, 14, 15, 16, 17, 18, 19, 20, 21, 22, 23, 24, 25, 26, 27, 28, 29, 30, 31, 32, 33, 34, 35, 36, 37, 38, 39, 40, 41, 42, 43, 44, 45, 50, 55, 60, 65, 70, 75, 80, 85, 90, 95, 100, 110, 120, 130, 140, 150, 160, 170, 180, 190, 200, 210, 220, 230, 240, 250, 260, 270, 280, 285, 290, 300, 310, 320, 330, 340, 350, 360, 370, 380, 390, 395, 396, 397, 398, 399, 400, 410, 411, 412, 413, 414, 415, 420, 425, 430, 435, 440, 445, 450 or 500 or more consecutive nucleotides or any range or value therein of a nucleic acid encoding a HECT E3 UPL polypeptide (e.g., HECT E3 UPL3 polypeptide), optionally a fragment of a HECT E3 UPL gene may be about 5, 6, 7, 8, 9, or 10 consecutive nucleotides to about 300, 320, 350, 375, 400 or more consecutive nucleotides in length, may be about 5, 6, 7, 8, 9, 10, 11, 12, 13, 14, 15, 16, 17, 18, 19, or 20 consecutive nucleotides to about 30, 35, 40, 45, 50, 55, 60, 65, 70, 75, 80, 85, 90, 95, or 100 consecutive nucleotides, or about 80, 85, 90, 95, or 100 consecutive nucleotides to about 300, 320, 350, 375, 400 or more consecutive nucleotides in length, or any range or value therein.

[0132] In some embodiments, a “sequence-specific nucleic acid binding domain” may bind to one or more fragments or portions of nucleotide sequences (e.g., DNA, RNA) encoding, for example, HECT E3 UPL polypeptides as described herein.

[0133] As used herein with respect to polypeptides, the term “fragment” or “portion” may refer to a polypeptide that is reduced in length relative to a reference polypeptide and that comprises, consists essentially of and/or consists of an amino acid sequence of contiguous amino acids identical or almost identical (e.g., 90%, 91%, 92%, 93%, 94%, 95%, 96%, 97%, 98%, 99% identical) to a corresponding portion of the reference polypeptide. Such a polypeptide fragment may be, where appropriate, included in a larger polypeptide of which it is a constituent. In some embodiments, a polypeptide fragment may comprise, consist essentially of or consist of at least about 2, 3, 4, 5, 6, 7, 8, 9, 10, 11, 12, 13, 14, 15, 20, 25, 30, 35, 40, 45, 50, 55, 60, 65, 70, 75, 80, 85, 90, 95, 100, 125, 150, 175, 200, 225, 250, 260, 270, 280, or 290 or more consecutive amino acids of a reference polypeptide. In some embodiments, a polypeptide fragment may comprise, consist essentially of or consist of about 10, 11, 12, 13, 14, 15, 16, 17, 18, 19, 20, 21, 22, 23, 24, 25, 26, 27, 28, 29, 30, 31, 32, 33, 34, 35, 36, 37, 38, 39, 40, 41, 42, 43, 44, 45, 46, 47, 48, 49, 50, 51, 52, 53, 54, 55, 56, 57, 58, 59, 60, 61, 62, 63, 64, 65, 66, 67, 68, 69, 70, 71, 72, 73, 74, 75, 76, 77, 78, 79, 80, 81, 82, 83, 84, 85, 86, 87, 88, 89, 90, 91, 92, 93, 94, 95, 96, 97, 98, 99, or 100 or more consecutive amino acid residues, or any range or value therein, of a HECT E3 UPL polypeptide (e.g., a HECT E3 UPL3 polypeptide) (e.g., a fragment or a portion of SEQ ID NO:78-83 (e.g., SEQ ID NOs:84-93).

[0134] In some embodiments, such a deletion may be a null allele, a dominant-negative allele, a semi-dominant allele, a hypermorphic mutation, a weak loss of function allele, or a hypomorphic mutation, which when comprised in a plant can result in the plant exhibiting one or more improved yield traits (such as increased seed size (e.g., seed area and/or seed weight) and/or increased seed oil content), as compared to a plant not comprising said deletion. A HECT E3 UPL gene (e.g., a HECT E3 UPL3 gene) may be edited in one or more than one location (and using one or more different editing tools), thereby providing a HECT E3 UPL gene comprising one or more than one mutation. In some embodiments, a HECT E3 UPL polypeptide mutated as described herein may comprise one or more than one edit that may result in a peptide having one or more than one amino acid substitution.

[0135] In some embodiments, a “portion” in reference to a nucleic acid means at least 2, 4, 5, 6, 7, 8, 9, 10, 11, 12, 13, 14, 15, 16, 17, 18, 19, 20, 21, 22, 23, 24, 25, 26, 27, 28, 29, 30, 31, 32, 33, 34, 35, 36, 37, 38, 39, 40, 41, 42, 43, 44, 45, 46, 47, 48, 49, 50, 51, 52, 53, 54, 55, 56, 57, 58, 59, 60, 61, 62, 63, 64, 65, 66, 67, 68, 69, 70, 71, 72, 73, 74, 75, 76, 77, 78, 79, 80, 81, 82, 83, 84, 85, 86, 87, 88, 89, 90, 91, 92, 93, 94, 95, 96, 97, 98, 99, 100, 110, 120, 130, 140, 150, 160, 170, 180, 190, 200, 210, 220, 230, 240, 250, 260, 270, 280, 285, 290, 300, 310, 320, 330, 340, 350, 360, 370, 380, 390, 395, 396, 397, 398, 399, 400, 410, 411, 412, 413, 414, 415, 420, 425, 430, 435, 440, 445, 450 or 500 or more consecutive nucleotides from a gene (e.g., consecutive nucleotides from a HECT E3 UPL gene).

[0136] In some embodiments, a portion of a HECT E3 UPL polypeptide sequence (e.g., HECT E3 UPL3 polypeptide) may be about 20 to about 100 or more consecutive amino acid residues in length (e.g., about 20, 21, 22, 23, 24, 25, 26, 27, 28, 29, 30, 31, 32, 33, 34, 35, 36, 37, 38, 39, 40, 41, 42, 43, 44, 45, 46, 47, 48, 49, 50, 51, 52, 53, 54, 55, 56, 57, 58, 59, 60, 61, 62, 63, 64, 65, 66, 67, 68, 69, 70, 71, 72, 73, 74, 75, 76, 77, 78, 79, 80, 81, 82, 83, 84, 85, 86, 87, 88, 89, 90, 91, 92, 93, 94, 95, 96, 97, 98, 99, or 100 or more consecutive amino acid residues in length (e.g., 22, 51, 58, 68, 71, 74, or 84 consecutive amino acid residues in length) (e.g., a portion of any one of SEQ ID NO:78-83 (see, e.g., SEQ ID NOs:84-93).

[0137] As used herein with respect to nucleic acids, the term “functional fragment” refers to nucleic acid that encodes a functional fragment of a polypeptide.

[0138] The term “gene,” as used herein, refers to a nucleic acid molecule capable of being used to produce mRNA, antisense RNA, miRNA, anti-microRNA antisense oligodeoxyribonucleotide (AMO) and the like. Genes may or may not be capable of being used to produce a functional protein or gene product. Genes can include both coding and non-coding regions (e.g., introns, regulatory elements, promoters, enhancers, termination sequences and/or 5′ and 3′ untranslated regions). A gene may be “isolated” by which is meant a nucleic acid that is substantially or essentially free from components normally found in association with the nucleic acid in its natural state. Such components include other cellular material, culture medium from recombinant production, and/or various chemicals used in chemically synthesizing the nucleic acid.

[0139] The term “mutation” refers to point mutations (e.g., missense, or nonsense, or insertions or deletions of single base pairs that result in frame shifts), insertions, deletions, inversions and/or truncations. When the mutation is a substitution of a residue within an amino acid sequence with another residue, or a deletion or insertion of one or more residues within a sequence, the mutations are typically described by identifying the original residue followed by the position of the residue within the sequence and by the identity of the newly substituted residue. A truncation can include a truncation at the C-terminal end of a polypeptide or at the N-terminal end of a polypeptide. A truncation of a polypeptide can be the result of a deletion of the corresponding 5′ end or 3′ end of the gene encoding the polypeptide. A frameshift mutation can occur when deletions or insertions of one or more base pairs are introduced into a gene, optionally resulting in an out-of-frame mutation or an in-frame mutation. Frameshift mutations in a gene can result in the production of a polypeptide that is longer, shorter or the same length as the wild type polypeptide depending on when the first stop codon occurs following the mutated region of the gene. As an example, an out-of-frame mutation that produces a premature stop codon can produce a polypeptide that is shorter that the wild type polypeptide, or, in some embodiments, the polypeptide may be absent/undetectable. In some embodiments, a mutation may be a DNA inversion, optionally a DNA inversion having a length of about 10 to about 2000 consecutive base pairs.

[0140] The terms “complementary” or “complementarity,” as used herein, refer to the natural binding of polynucleotides under permissive salt and temperature conditions by base-pairing. For example, the sequence “A-G-T” (5′ to 3′) binds to the complementary sequence “T-C-A” (3′ to 5′). Complementarity between two single-stranded molecules may be “partial,” in which only some of the nucleotides bind, or it may be complete when total complementarity exists between the single stranded molecules. The degree of complementarity between nucleic acid strands has significant effects on the efficiency and strength of hybridization between nucleic acid strands.

[0141] “Complement,” as used herein, can mean 100% complementarity with the comparator nucleotide sequence or it can mean less than 100% complementarity (e.g., about 70%, 71%, 72%, 73%, 74%, 75%, 76%, 77%, 78%, 79%, 80%, 81%, 82%, 83%, 84%, 85%, 86%, 87%, 88%, 89%, 90%, 91%, 92%, 93%, 94%, 95%, 96%, 97%, 98%, 99%, and the like, complementarity) to the comparator nucleotide sequence.

[0142] Different nucleic acids or proteins having homology are referred to herein as “homologues.” The term homologue includes homologous sequences from the same and from other species and orthologous sequences from the same and other species. “Homology” refers to the level of similarity between two or more nucleic acid and/or amino acid sequences in terms of percent of positional identity (i.e., sequence similarity or identity). Homology also refers to the concept of similar functional properties among different nucleic acids or proteins. Thus, the compositions and methods of the invention further comprise homologues to the nucleotide sequences and polypeptide sequences of this invention. “Orthologous,” as used herein, refers to homologous nucleotide sequences and/or amino acid sequences in different species that arose from a common ancestral gene during speciation. A homologue of a nucleotide sequence of this invention has a substantial sequence identity (e.g., at least about 70%, 71%, 72%, 73%, 74%, 75%, 76%, 77%, 78%, 79%, 80%, 81%, 82%, 83%, 84%, 85%, 86%, 87%, 88%, 89%, 90%, 91%, 92%, 93%, 94%, 95%, 96%, 97%, 98%, 99%, 99.5% or 100%) to said nucleotide sequence of the invention.

[0143] As used herein “sequence identity” refers to the extent to which two optimally aligned polynucleotide or polypeptide sequences are invariant throughout a window of alignment of components, e.g., nucleotides or amino acids. “Identity” can be readily calculated by known methods including, but not limited to, those described in: Computational Molecular Biology (Lesk, A. M., ed.) Oxford University Press, New York (1988); Biocomputing: Informatics and Genome Projects (Smith, D. W., ed.) Academic Press, New York (1993); Computer Analysis of Sequence Data, Part I (Griffin, A. M., and Griffin, H. G., eds.) Humana Press, New Jersey (1994); Sequence Analysis in Molecular Biology (von Heinje, G., ed.) Academic Press (1987); and Sequence Analysis Primer (Gribskov, M. and Devereux, J., eds.) Stockton Press, New York (1991).

[0144] As used herein, the term “percent sequence identity” or “percent identity” refers to the percentage of identical nucleotides in a linear polynucleotide sequence of a reference (“query”) polynucleotide molecule (or its complementary strand) as compared to a test (“subject”) polynucleotide molecule (or its complementary strand) when the two sequences are optimally aligned. In some embodiments, “percent sequence identity” can refer to the percentage of identical amino acids in an amino acid sequence as compared to a reference polypeptide.

[0145] As used herein, the phrase “substantially identical,” or “substantial identity” in the context of two nucleic acid molecules, nucleotide sequences, or polypeptide sequences, refers to two or more sequences or subsequences that have at least about 70%, 71%, 72%, 73%, 74%, 75%, 76%, 77%, 78%, 79%, 80%, 81%, 82%, 83%, 84%, 85%, 86%, 87%, 88%, 89%, 90%, 91%, 92%, 93%, 94%, 95%, 96%, 97%, 98%, 99%, 99.5% or 100% nucleotide or amino acid residue identity, when compared and aligned for maximum correspondence, as measured using one of the following sequence comparison algorithms or by visual inspection. In some embodiments of the invention, the substantial identity exists over a region of consecutive nucleotides of a nucleotide sequence of the invention that is about 10 nucleotides to about 20 nucleotides, about 10 nucleotides to about 25 nucleotides, about 10 nucleotides to about 30 nucleotides, about 15 nucleotides to about 25 nucleotides, about 30 nucleotides to about 40 nucleotides, about 50 nucleotides to about 60 nucleotides, about 70 nucleotides to about 80 nucleotides, about 90 nucleotides to about 100 nucleotides, about 100 nucleotides to about 200 nucleotides, about 100 nucleotides to about 300 nucleotides, about 100 nucleotides to about 400 nucleotides, about 100 nucleotides to about 500 nucleotides, about 100 nucleotides to about 600 nucleotides, about 100 nucleotides to about 800 nucleotides, about 100 nucleotides to about 900 nucleotides, or more in length, or any range therein, up to the full length of the sequence. In some embodiments, nucleotide sequences can be substantially identical over at least about 20 nucleotides (e.g., about 20, 21, 22, 23, 24, 25, 26, 27, 28, 29, 30, 31, 32, 33, 34, 35, 36, 37, 38, 39, 40, 50, 60, 70, or 80 nucleotides or more).

[0146] In some embodiments of the invention, the substantial identity exists over a region of consecutive amino acid residues of a polypeptide of the invention that is about 3 amino acid residues to about 20 amino acid residues, about 5 amino acid residues to about 25 amino acid residues, about 7 amino acid residues to about 30 amino acid residues, about 10 amino acid residues to about 25 amino acid residues, about 15 amino acid residues to about 30 amino acid residues, about 20 amino acid residues to about 40 amino acid residues, about 25 amino acid residues to about 40 amino acid residues, about 25 amino acid residues to about 50 amino acid residues, about 30 amino acid residues to about 50 amino acid residues, about 40 amino acid residues to about 50 amino acid residues, about 40 amino acid residues to about 70 amino acid residues, about 50 amino acid residues to about 70 amino acid residues, about 60 amino acid residues to about 80 amino acid residues, about 70 amino acid residues to about 80 amino acid residues, about 90 amino acid residues to about 100 amino acid residues, or more amino acid residues in length, and any range therein, up to the full length of the sequence. In some embodiments, polypeptide sequences can be substantially identical to one another over at least about 8 consecutive amino acid residues (e.g., about 8, 9, 10, 11, 12, 13, 14, 15, 16, 17, 18, 19, 20, 21, 22, 23, 24, 25, 26, 27, 28, 29, 30, 31, 32, 33, 34, 35, 36, 37, 38, 39, 40, 41, 42, 43, 44, 45, 46, 47, 48, 49, 50, 51, 52, 53, 54, 55, 56, 57, 58, 59, 60, 61, 62, 63, 64, 65, 66, 67, 68, 69, 70, 71, 72, 73, 74, 75, 76, 77, 78, 79, 80, 81, 82, 83, 84, 85, 86, 87, 88, 89, 90, 91, 92, 93, 94, 95, 96, 97, 98, 99, 100, 101, 102, 103, 104, 105, 106, 107, 108, 109, 110, 111, 112, 113, 114, 115, 116, 117, 118, 119, 120, 130, 140, 150, 175, 200, 225, 250, 300, 350 or more amino acids in length or more consecutive amino acid residues). In some embodiments, two or more HECT E3 UPL polypeptides may be identical or substantially identical (e.g., at least 70% to 99.9% identical; e.g., about 70%, 71%, 72%, 73%, 74%, 75%, 76%, 77%, 78%, 79%, 80%, 81%, 82%, 83%, 84%, 85%, 86%, 87%, 88%, 89%, 90%, 91%, 92%, 93%, 94%, 95%, 96%, 97%, 98%, 99%, 99.5%. 99.9% identical or any range or value therein).

[0147] For sequence comparison, typically one sequence acts as a reference sequence to which test sequences are compared. When using a sequence comparison algorithm, test and reference sequences are entered into a computer, subsequence coordinates are designated if necessary, and sequence algorithm program parameters are designated. The sequence comparison algorithm then calculates the percent sequence identity for the test sequence(s) relative to the reference sequence, based on the designated program parameters.

[0148] Optimal alignment of sequences for aligning a comparison window are well known to those skilled in the art and may be conducted by tools such as the local homology algorithm of Smith and Waterman, the homology alignment algorithm of Needleman and Wunsch, the search for similarity method of Pearson and Lipman, and optionally by computerized implementations of these algorithms such as GAP, BESTFIT, FASTA, and TFASTA available as part of the GCG® Wisconsin Package® (Accelrys Inc., San Diego, Calif.). An “identity fraction” for aligned segments of a test sequence and a reference sequence is the number of identical components which are shared by the two aligned sequences divided by the total number of components in the reference sequence segment, e.g., the entire reference sequence or a smaller defined part of the reference sequence. Percent sequence identity is represented as the identity fraction multiplied by 100. The comparison of one or more polynucleotide sequences may be to a full-length polynucleotide sequence or a portion thereof, or to a longer polynucleotide sequence. For purposes of this invention “percent identity” may also be determined using BLASTX version 2.0 for translated nucleotide sequences and BLASTN version 2.0 for polynucleotide sequences.

[0149] Two nucleotide sequences may also be considered substantially complementary when the two sequences hybridize to each other under stringent conditions. In some embodiments, two nucleotide sequences considered to be substantially complementary hybridize to each other under highly stringent conditions.

[0150] “Stringent hybridization conditions” and “stringent hybridization wash conditions” in the context of nucleic acid hybridization experiments such as Southern and Northern hybridizations are sequence dependent and are different under different environmental parameters. An extensive guide to the hybridization of nucleic acids is found in Tijssen Laboratory Techniques in Biochemistry and Molecular Biology-Hybridization with Nucleic Acid Probes part I chapter 2 “Overview of principles of hybridization and the strategy of nucleic acid probe assays” Elsevier, New York (1993). Generally, highly stringent hybridization and wash conditions are selected to be about 5° C. lower than the thermal melting point (Tₘ) for the specific sequence at a defined ionic strength and pH.

[0151] The Tₘ is the temperature (under defined ionic strength and pH) at which 50% of the target sequence hybridizes to a perfectly matched probe. Very stringent conditions are selected to be equal to the Tₘ for a particular probe. An example of stringent hybridization conditions for hybridization of complementary nucleotide sequences which have more than 100 complementary residues on a filter in a Southern or northern blot is 50% formamide with 1 mg of heparin at 42° C., with the hybridization being carried out overnight. An example of highly stringent wash conditions is 0.1 5M NaCl at 72° C. for about 15 minutes. An example of stringent wash conditions is a 0.2×SSC wash at 65° C. for 15 minutes (see, Sambrook, infra, for a description of SSC buffer). Often, a high stringency wash is preceded by a low stringency wash to remove background probe signal. An example of a medium stringency wash for a duplex of, e.g., more than 100 nucleotides, is 1×SSC at 45° C. for 15 minutes. An example of a low stringency wash for a duplex of, e.g., more than 100 nucleotides, is 4-6×SSC at 40° C. for 15 minutes. For short probes (e.g., about 10 to 50 nucleotides), stringent conditions typically involve salt concentrations of less than about 1.0 M Na ion, typically about 0.01 to 1.0 M Na ion concentration (or other salts) at pH 7.0 to 8.3, and the temperature is typically at least about 30° C. Stringent conditions can also be achieved with the addition of destabilizing agents such as formamide. In general, a signal to noise ratio of 2× (or higher) than that observed for an unrelated probe in the particular hybridization assay indicates detection of a specific hybridization. Nucleotide sequences that do not hybridize to each other under stringent conditions are still substantially identical if the proteins that they encode are substantially identical. This can occur, for example, when a copy of a nucleotide sequence is created using the maximum codon degeneracy permitted by the genetic code.

[0152] A polynucleotide and/or recombinant nucleic acid construct of this invention (e.g., expression cassettes and/or vectors) may be codon optimized for expression. In some embodiments, the polynucleotides, nucleic acid constructs, expression cassettes, and/or vectors of the editing systems of the invention (e.g., comprising/encoding a sequence-specific nucleic acid binding domain (e.g., a sequence-specific nucleic acid binding domain (e.g., DNA binding domain) from a polynucleotide-guided endonuclease, a zinc finger nuclease, a transcription activator-like effector nuclease (TALEN), an Argonaute protein, and/or a CRISPR-Cas endonuclease CRISPR-Cas effector protein) (e.g., a Type I CRISPR-Cas effector protein, a Type II CRISPR-Cas effector protein, a Type III CRISPR-Cas effector protein, a Type IV CRISPR-Cas effector protein, a Type V CRISPR-Cas effector protein or a Type VI CRISPR-Cas effector protein)), a nuclease (e.g., an endonuclease (e.g., Fok1), a polynucleotide-guided endonuclease, a CRISPR-Cas endonuclease CRISPR-Cas effector protein), a zinc finger nuclease, and/or a transcription activator-like effector nuclease (TALEN)), deaminase proteins/domains (e.g., adenine deaminase, cytosine deaminase), a polynucleotide encoding a reverse transcriptase protein or domain, a polynucleotide encoding a 5′-3′ exonuclease polypeptide, and/or affinity polypeptides, peptide tags, etc.) may be codon optimized for expression in a plant. In some embodiments, the codon optimized nucleic acids, polynucleotides, expression cassettes, and/or vectors of the invention have about 70% to about 99.9% (e.g., 70%, 71%, 72%, 73%, 74%, 75%, 76%, 77%, 78%, 79%, 80%, 81%, 82%, 83%, 84%, 85%, 86%, 87%, 88%, 89%, 90%, 91%, 92%, 93%, 94%, 95%, 96%, 97%, 98%, 99%, 99.5%. 99.9% or 100%) identity or more to the reference nucleic acids, polynucleotides, expression cassettes, and/or vectors that have not been codon optimized.

[0153] In any of the embodiments described herein, a polynucleotide or nucleic acid construct of the invention may be operatively associated with a variety of promoters and/or other regulatory elements for expression in a plant and/or a cell of a plant. Thus, in some embodiments, a polynucleotide or nucleic acid construct of this invention may further comprise one or more promoters, introns, enhancers, and/or terminators operably linked to one or more nucleotide sequences. In some embodiments, a promoter may be operably associated with an intron (e.g., Ubi1 promoter and intron). In some embodiments, a promoter associated with an intron maybe referred to as a “promoter region” (e.g., Ubi1 promoter and intron).

[0154] By “operably linked” or “operably associated” as used herein in reference to polynucleotides, it is meant that the indicated elements are functionally related to each other and are also generally physically related. Thus, the term “operably linked” or “operably associated” as used herein, refers to nucleotide sequences on a single nucleic acid molecule that are functionally associated. Thus, a first nucleotide sequence that is operably linked to a second nucleotide sequence means a situation when the first nucleotide sequence is placed in a functional relationship with the second nucleotide sequence. For instance, a promoter is operably associated with a nucleotide sequence if the promoter effects the transcription or expression of said nucleotide sequence. Those skilled in the art will appreciate that the control sequences (e.g., promoter) need not be contiguous with the nucleotide sequence to which it is operably associated, as long as the control sequences function to direct the expression thereof. Thus, for example, intervening untranslated, yet transcribed, nucleic acid sequences can be present between a promoter and the nucleotide sequence, and the promoter can still be considered “operably linked” to the nucleotide sequence.

[0155] As used herein, the term “linked,” in reference to polypeptides, refers to the attachment of one polypeptide to another. A polypeptide may be linked to another polypeptide (at the N-terminus or the C-terminus) directly (e.g., via a peptide bond) or through a linker.

[0156] The term “linker” is art-recognized and refers to a chemical group, or a molecule linking two molecules or moieties, e.g., two domains of a fusion protein, such as, for example, a nucleic acid binding polypeptide or domain and peptide tag and/or a reverse transcriptase and an affinity polypeptide that binds to the peptide tag; or a DNA endonuclease polypeptide or domain and peptide tag and/or a reverse transcriptase and an affinity polypeptide that binds to the peptide tag. A linker may be comprised of a single linking molecule or may comprise more than one linking molecule. In some embodiments, the linker can be an organic molecule, group, polymer, or chemical moiety such as a bivalent organic moiety. In some embodiments, the linker may be an amino acid or it may be a peptide. In some embodiments, the linker is a peptide.

[0157] In some embodiments, a peptide linker useful with this invention may be about 2 to about 100 or more amino acids in length, for example, about 2, 3, 4, 5, 6, 7, 8, 9, 10, 11, 12, 13, 14, 15, 16, 17, 18, 19, 20, 21, 22, 23, 24, 25, 26, 27, 28, 29, 30, 31, 32, 33, 34, 35, 36, 37, 38, 39, 40, 41, 42, 43, 44, 45, 46, 47, 48, 49, 50, 51, 52, 53, 54, 55, 56, 57, 58, 59, 60, 61, 62, 63, 64, 65, 66, 67, 68, 69, 70, 71, 72, 73, 74, 75, 76, 77, 78, 79, 80, 81, 82, 83, 84, 85, 86, 87, 88, 89, 90, 91, 92, 93, 94, 95, 96, 97, 98, 99, 100 or more amino acids in length (e.g., about 2 to about 40, about 2 to about 50, about 2 to about 60, about 4 to about 40, about 4 to about 50, about 4 to about 60, about 5 to about 40, about 5 to about 50, about 5 to about 60, about 9 to about 40, about 9 to about 50, about 9 to about 60, about 10 to about 40, about 10 to about 50, about 10 to about 60, or about 2, 3, 4, 5, 6, 7, 8, 9, 10, 11, 12, 13, 14, 15, 16, 17, 18, 19, 20, 21, 22, 23, 24, 25 amino acids to about 26, 27, 28, 29, 30, 31, 32, 33, 34, 35, 36, 37, 38, 39, 40, 41, 42, 43, 44, 45, 46, 47, 48, 49, 50, 51, 52, 53, 54, 55, 56, 57, 58, 59, 60, 61, 62, 63, 64, 65, 66, 67, 68, 69, 70, 71, 72, 73, 74, 75, 76, 77, 78, 79, 80, 81, 82, 83, 84, 85, 86, 87, 88, 89, 90, 91, 92, 93, 94, 95, 96, 97, 98, 99, 100 or more amino acids in length (e.g., about 105, 110, 115, 120, 130, 140 150 or more amino acids in length). In some embodiments, a peptide linker may be a GS linker.

[0158] As used herein, the term “linked,” or “fused” in reference to polynucleotides, refers to the attachment of one polynucleotide to another. In some embodiments, two or more polynucleotide molecules may be linked by a linker that can be an organic molecule, group, polymer, or chemical moiety such as a bivalent organic moiety. A polynucleotide may be linked or fused to another polynucleotide (at the 5′ end or the 3′ end) via a covalent or non-covenant linkage or binding, including e.g., Watson-Crick base-pairing, or through one or more linking nucleotides. In some embodiments, a polynucleotide motif of a certain structure may be inserted within another polynucleotide sequence (e.g., extension of the hairpin structure in the guide RNA). In some embodiments, the linking nucleotides may be naturally occurring nucleotides. In some embodiments, the linking nucleotides may be non-naturally occurring nucleotides.

[0159] A “promoter” is a nucleotide sequence that controls or regulates the transcription of a nucleotide sequence (e.g., a coding sequence) that is operably associated with the promoter. The coding sequence controlled or regulated by a promoter may encode a polypeptide and/or a functional RNA. Typically, a “promoter” refers to a nucleotide sequence that contains a binding site for RNA polymerase II and directs the initiation of transcription. In general, promoters are found 5′, or upstream, relative to the start of the coding region of the corresponding coding sequence. A promoter may comprise other elements that act as regulators of gene expression; e.g., a promoter region. These include a TATA box consensus sequence, and often a CAAT box consensus sequence (Breathnach and Chambon, (1981) Annu. Rev. Biochem. 50:349). In plants, the CAAT box may be substituted by the AGGA box (Messing et al., (1983) in Genetic Engineering of Plants, T. Kosuge, C. Meredith and A. Hollaender (eds.), Plenum Press, pp. 211-227).

[0160] Promoters useful with this invention can include, for example, constitutive, inducible, temporally regulated, developmentally regulated, chemically regulated, tissue-preferred and/or tissue-specific promoters for use in the preparation of recombinant nucleic acid molecules, e.g., “synthetic nucleic acid constructs” or “protein-RNA complex.” These various types of promoters are known in the art.

[0161] The choice of promoter may vary depending on the temporal and spatial requirements for expression, and also may vary based on the host cell to be transformed. Promoters for many different organisms are well known in the art. Based on the extensive knowledge present in the art, the appropriate promoter can be selected for the particular host organism of interest. Thus, for example, much is known about promoters upstream of highly constitutively expressed genes in model organisms and such knowledge can be readily accessed and implemented in other systems as appropriate.

[0162] In some embodiments, a promoter functional in a plant may be used with the constructs of this invention. Non-limiting examples of a promoter useful for driving expression in a plant include the promoter of the RubisCo small subunit gene 1 (PrbcS1), the promoter of the actin gene (Pactin), the promoter of the nitrate reductase gene (Pnr) and the promoter of duplicated carbonic anhydrase gene 1 (Pdca1) (See, Walker et al. Plant Cell Rep. 23:727-735 (2005); Li et al. Gene 403:132-142 (2007); Li et al. Mol Biol. Rep. 37:1143-1154 (2010)). PrbcS1 and Pactin are constitutive promoters and Pnr and Pdca1 are inducible promoters. Pnr is induced by nitrate and repressed by ammonium (Li et al. Gene 403:132-142 (2007)) and Pdca1 is induced by salt (Li et al. Mol Biol. Rep. 37:1143-1154 (2010)). In some embodiments, a promoter useful with this invention is RNA polymerase II (Pol II) promoter. In some embodiments, a U6 promoter or a 7SL promoter from Zea mays may be useful with constructs of this invention. In some embodiments, the U6c promoter and/or 7SL promoter from Zea mays may be useful for driving expression of a guide nucleic acid. In some embodiments, a U6c promoter, U6i promoter and/or 7SL promoter from Glycine max may be useful with constructs of this invention. In some embodiments, the U6c promoter, U6i promoter and/or 7SL promoter from Glycine max may be useful for driving expression of a guide nucleic acid.

[0163] Examples of constitutive promoters useful for plants include, but are not limited to, cestrum virus promoter (cmp) (U.S. Pat. No. 7,166,770), the rice actin 1 promoter (Wang et al. (1992) Mol. Cell. Biol. 12:3399-3406; as well as U.S. Pat. No. 5,641,876), CaMV 35S promoter (Odell et al. (1985) Nature 313:810-812), CaMV 19S promoter (Lawton et al. (1987) Plant Mol. Biol. 9:315-324), nos promoter (Ebert et al. (1987) Proc. Natl. Acad. Sci USA 84:5745-5749), Adh promoter (Walker et al. (1987) Proc. Natl. Acad. Sci. USA 84:6624-6629), sucrose synthase promoter (Yang & Russell (1990) Proc. Natl. Acad. Sci. USA 87:4144-4148), and the ubiquitin promoter. The constitutive promoter derived from ubiquitin accumulates in many cell types. Ubiquitin promoters have been cloned from several plant species for use in transgenic plants, for example, sunflower (Binet et al., 1991. Plant Science 79: 87-94), maize (Christensen et al., 1989. Plant Molec. Biol. 12: 619-632), and Arabidopsis (Norris et al. 1993. Plant Molec. Biol. 21:895-906). The maize ubiquitin promoter (UbiP) has been developed in transgenic monocot systems and its sequence and vectors constructed for monocot transformation are disclosed in the patent publication EP 0 342 926. The ubiquitin promoter is suitable for the expression of the nucleotide sequences of the invention in transgenic plants, especially monocotyledons. Further, the promoter expression cassettes described by McElroy et al. (Mol. Gen. Genet. 231: 150-160 (1991)) can be easily modified for the expression of the nucleotide sequences of the invention and are particularly suitable for use in monocotyledonous hosts.

[0164] In some embodiments, tissue specific/tissue preferred promoters can be used for expression of a heterologous polynucleotide in a plant cell. Tissue specific or preferred expression patterns include, but are not limited to, green tissue specific or preferred, root specific or preferred, stem specific or preferred, flower specific or preferred or pollen specific or preferred. Promoters suitable for expression in green tissue include many that regulate genes involved in photosynthesis and many of these have been cloned from both monocotyledons and dicotyledons. In one embodiment, a promoter useful with the invention is the maize PEPC promoter from the phosphoenol carboxylase gene (Hudspeth & Grula, Plant Molec. Biol. 12:579-589 (1989)). Non-limiting examples of tissue-specific promoters include those associated with genes encoding the seed storage proteins (such as β-conglycinin, cruciferin, napin and phaseolin), zein or oil body proteins (such as oleosin), or proteins involved in fatty acid biosynthesis (including acyl carrier protein, stearoyl-ACP desaturase and fatty acid desaturases (fad 2-1)), and other nucleic acids expressed during embryo development (such as Bce4, see, e.g., Kridl et al. (1991) Seed Sci. Res. 1:209-219; as well as EP Patent No. 255378). Tissue-specific or tissue-preferential promoters useful for the expression of the nucleotide sequences of the invention in plants, particularly maize, include but are not limited to those that direct expression in root, pith, leaf or pollen. Such promoters are disclosed, for example, in WO 93/07278, herein incorporated by reference in its entirety. Other non-limiting examples of tissue specific or tissue preferred promoters useful with the invention the cotton rubisco promoter disclosed in U.S. Pat. No. 6,040,504; the rice sucrose synthase promoter disclosed in U.S. Pat. No. 5,604,121; the root specific promoter described by de Framond (FEBS 290:103-106 (1991); EP 0 452 269 to Ciba-Geigy); the stem specific promoter described in U.S. Pat. No. 5,625,136 (to Ciba-Geigy) and which drives expression of the maize trpA gene; the cestrum yellow leaf curling virus promoter disclosed in WO 01/73087; and pollen specific or preferred promoters including, but not limited to, ProOsLPS10 and ProOsLPS11 from rice (Nguyen et al. Plant Biotechnol. Reports 9(5):297-306 (2015)), ZmSTK2_USP from maize (Wang et al. Genome 60(6):485-495 (2017)), LAT52 and LAT59 from tomato (Twell et al. Development 109(3):705-713 (1990)), Zm13 (U.S. Pat. No. 10,421,972), PLA₂-δ promoter from Arabidopsis (U.S. Pat. No. 7,141,424), and/or the ZmC5 promoter from maize (International PCT Publication No. WO1999/042587.

[0165] Additional examples of plant tissue-specific/tissue preferred promoters include, but are not limited to, the root hair-specific cis-elements (RHEs) (Kim et al. The Plant Cell 18.2958-2970 (2006)), the root-specific promoters RCc3 (Jeong et al. Plant Physiol. 153:185-197 (2010)) and RB7 (U.S. Pat. No. 5,459,252), the lectin promoter (Lindstrom et al. (1990) Der. Genet. 11:160-167; and Vodkin (1983) Prog. Clin. Biol. Res. 138:87-98), corn alcohol dehydrogenase 1 promoter (Dennis et al. (1984) Nucleic Acids Res. 12:3983-4000), S-adenosyl-L-methionine synthetase (SAMS) (Vander Mijnsbrugge et al. (1996) Plant and Cell Physiology, 37(8):1108-1115), corn light harvesting complex promoter (Bansal et al. (1992) Proc. Natl. Acad. Sci. USA 89:3654-3658), corn heat shock protein promoter (O'Dell et al. (1985) EMBO J. 5:451-458; and Rochester et al. (1986) EMBO J. 5:451-458), pea small subunit RuBP carboxylase promoter (Cashmore, “Nuclear genes encoding the small subunit of ribulose-1,5-bisphosphate carboxylase” pp. 29-39 In: Genetic Engineering of Plants (Hollaender ed., Plenum Press 1983; and Poulsen et al. (1986) Mol. Gen. Genet. 205:193-200), Ti plasmid mannopine synthase promoter (Langridge et al. (1989) Proc. Natl. Acad. Sci. USA 86:3219-3223), Ti plasmid nopaline synthase promoter (Langridge et al. (1989), supra), petunia chalcone isomerase promoter (van Tunen et al. (1988) EMBO J. 7:1257-1263), bean glycine rich protein 1 promoter (Keller et al. (1989) Genes Dev. 3:1639-1646), truncated CaMV 35S promoter (O'Dell et al. (1985) Nature 313:810-812), potato patatin promoter (Wenzler et al. (1989) Plant Mol. Biol. 13:347-354), root cell promoter (Yamamoto et al. (1990) Nucleic Acids Res. 18:7449), maize zein promoter (Kriz et al. (1987) Mol. Gen. Genet. 207:90-98; Langridge et al. (1983) Cell 34:1015-1022; Reina et al. (1990) Nucleic Acids Res. 18:6425; Reina et al. (1990) Nucleic Acids Res. 18:7449; and Wandelt et al. (1989) Nucleic Acids Res. 17:2354), globulin-1 promoter (Belanger et al. (1991) Genetics 129:863-872), α-tubulin cab promoter (Sullivan et al. (1989) Mol. Gen. Genet. 215:431-440), PEPCase promoter (Hudspeth & Grula (1989) Plant Mol. Biol. 12:579-589), R gene complex-associated promoters (Chandler et al. (1989) Plant Cell 1:1175-1183), and chalcone synthase promoters (Franken et al. (1991) EMBO J. 10:2605-2612).

[0166] Useful for seed-specific expression is the pea vicilin promoter (Czako et al. (1992) Mol. Gen. Genet. 235:33-40; as well as the seed-specific promoters disclosed in U.S. Pat. No. 5,625,136. Useful promoters for expression in mature leaves are those that are switched at the onset of senescence, such as the SAG promoter from Arabidopsis (Gan et al. (1995) Science 270:1986-1988).

[0167] In addition, promoters functional in chloroplasts can be used. Non-limiting examples of such promoters include the bacteriophage T3 gene 9 5′ UTR and other promoters disclosed in U.S. Pat. No. 7,579,516. Other promoters useful with the invention include but are not limited to the S-E9 small subunit RuBP carboxylase promoter and the Kunitz trypsin inhibitor gene promoter (Kti3).

[0168] Additional regulatory elements useful with this invention include, but are not limited to, introns, enhancers, termination sequences and/or 5′ and 3′ untranslated regions.

[0169] An intron useful with this invention can be an intron identified in and isolated from a plant and then inserted into an expression cassette to be used in transformation of a plant. As would be understood by those of skill in the art, introns can comprise the sequences required for self-excision and are incorporated into nucleic acid constructs/expression cassettes in frame. An intron can be used either as a spacer to separate multiple protein-coding sequences in one nucleic acid construct, or an intron can be used inside one protein-coding sequence to, for example, stabilize the mRNA. If they are used within a protein-coding sequence, they are inserted “in-frame” with the excision sites included. Introns may also be associated with promoters to improve or modify expression. As an example, a promoter/intron combination useful with this invention includes but is not limited to that of the maize Ubi1 promoter and intron (see, e.g., SEQ ID NO:21 and SEQ ID NO:22).

[0170] Non-limiting examples of introns useful with the present invention include introns from the ADHI gene (e.g., Adh1-S introns 1, 2 and 6), the ubiquitin gene (Ubi1), the RuBisCO small subunit (rbcS) gene, the RuBisCO large subunit (rbcL) gene, the actin gene (e.g., actin-1 intron), the pyruvate dehydrogenase kinase gene (pdk), the nitrate reductase gene (nr), the duplicated carbonic anhydrase gene 1 (Tdca1), the psbA gene, the atpA gene, or any combination thereof.

[0171] In some embodiments, a polynucleotide and/or a nucleic acid construct of the invention can be an “expression cassette” or can be comprised within an expression cassette. As used herein, “expression cassette” means a recombinant nucleic acid molecule comprising, for example, a one or more polynucleotides of the invention (e.g., a polynucleotide encoding a sequence-specific nucleic acid binding domain, a polynucleotide encoding a deaminase protein or domain, a polynucleotide encoding a reverse transcriptase protein or domain, a polynucleotide encoding a 5′-3′ exonuclease polypeptide or domain, a guide nucleic acid and/or reverse transcriptase (RT) template), wherein polynucleotide(s) is/are operably associated with one or more control sequences (e.g., a promoter, terminator and the like). Thus, in some embodiments, one or more expression cassettes may be provided, which are designed to express, for example, a nucleic acid construct of the invention (e.g., a polynucleotide encoding a sequence-specific nucleic acid binding domain, a polynucleotide encoding a nuclease polypeptide/domain, a polynucleotide encoding a deaminase protein/domain, a polynucleotide encoding a reverse transcriptase protein/domain, a polynucleotide encoding a 5′-3′ exonuclease polypeptide/domain, a polynucleotide encoding a peptide tag, and/or a polynucleotide encoding an affinity polypeptide, and the like, or comprising a guide nucleic acid, an extended guide nucleic acid, and/or RT template, and the like). When an expression cassette of the present invention comprises more than one polynucleotide, the polynucleotides may be operably linked to a single promoter that drives expression of all of the polynucleotides or the polynucleotides may be operably linked to one or more separate promoters (e.g., three polynucleotides may be driven by one, two or three promoters in any combination). When two or more separate promoters are used, the promoters may be the same promoter, or they may be different promoters. Thus, a polynucleotide encoding a sequence specific nucleic acid binding domain, a polynucleotide encoding a nuclease protein/domain, a polynucleotide encoding a CRISPR-Cas effector protein/domain, a polynucleotide encoding an deaminase protein/domain, a polynucleotide encoding a reverse transcriptase polypeptide/domain (e.g., RNA-dependent DNA polymerase), and/or a polynucleotide encoding a 5′-3′ exonuclease polypeptide/domain, a guide nucleic acid, an extended guide nucleic acid and/or RT template when comprised in a single expression cassette may each be operably linked to a single promoter, or separate promoters in any combination.

[0172] An expression cassette comprising a nucleic acid construct of the invention may be chimeric, meaning that at least one (e.g., one or more) of its components is heterologous with respect to at least one of its other components (e.g., a promoter from the host organism operably linked to a polynucleotide of interest to be expressed in the host organism, wherein the polynucleotide of interest is from a different organism than the host or is not normally found in association with that promoter). An expression cassette may also be one that is naturally occurring but has been obtained in a recombinant form useful for heterologous expression.

[0173] An expression cassette can optionally include a transcriptional and/or translational termination region (i.e., termination region) and/or an enhancer region that is functional in the selected host cell. A variety of transcriptional terminators and enhancers are known in the art and are available for use in expression cassettes. Transcriptional terminators are responsible for the termination of transcription and correct mRNA polyadenylation. A termination region and/or the enhancer region may be native to the transcriptional initiation region, may be native to, for example, a gene encoding a sequence-specific nucleic acid binding protein, a gene encoding a nuclease, a gene encoding a reverse transcriptase, a gene encoding a deaminase, and the like, or may be native to a host cell, or may be native to another source (e.g., foreign or heterologous to, for example, to a promoter, to a gene encoding a sequence-specific nucleic acid binding protein, a gene encoding a nuclease, a gene encoding a reverse transcriptase, a gene encoding a deaminase, and the like, or to the host cell, or any combination thereof).

[0174] An expression cassette of the invention also can include a polynucleotide encoding a selectable marker, which can be used to select a transformed host cell. As used herein, “selectable marker” means a polynucleotide sequence that when expressed imparts a distinct phenotype to the host cell expressing the marker and thus allows such transformed cells to be distinguished from those that do not have the marker. Such a polynucleotide sequence may encode either a selectable or screenable marker, depending on whether the marker confers a trait that can be selected for by chemical means, such as by using a selective agent (e.g., an antibiotic and the like), or on whether the marker is simply a trait that one can identify through observation or testing, such as by screening (e.g., fluorescence). Many examples of suitable selectable markers are known in the art and can be used in the expression cassettes described herein.

[0175] In addition to expression cassettes, the nucleic acid molecules/constructs and polynucleotide sequences described herein can be used in connection with vectors. The term “vector” refers to a composition for transferring, delivering or introducing a nucleic acid (or nucleic acids) into a cell. A vector comprises a nucleic acid construct (e.g. expression cassette(s)) comprising the nucleotide sequence(s) to be transferred, delivered or introduced. Vectors for use in transformation of host organisms are well known in the art. Non-limiting examples of general classes of vectors include viral vectors, plasmid vectors, phage vectors, phagemid vectors, cosmid vectors, fosmid vectors, bacteriophages, artificial chromosomes, minicircles, or Agrobacterium binary vectors in double or single stranded linear or circular form which may or may not be self-transmissible or mobilizable. In some embodiments, a viral vector can include, but is not limited, to a retroviral, lentiviral, adenoviral, adeno-associated, or herpes simplex viral vector. A vector as defined herein can transform a prokaryotic or eukaryotic host either by integration into the cellular genome or exist extrachromosomally (e.g., autonomous replicating plasmid with an origin of replication). Additionally, included are shuttle vectors by which is meant a DNA vehicle capable, naturally or by design, of replication in two different host organisms, which may be selected from actinomycetes and related species, bacteria and eukaryotic (e.g., higher plant, mammalian, yeast or fungal cells). In some embodiments, the nucleic acid in the vector is under the control of, and operably linked to, an appropriate promoter or other regulatory elements for transcription in a host cell. The vector may be a bi-functional expression vector which functions in multiple hosts. In the case of genomic DNA, this may contain its own promoter and/or other regulatory elements and in the case of cDNA this may be under the control of an appropriate promoter and/or other regulatory elements for expression in the host cell. Accordingly, a nucleic acid or polynucleotide of this invention and/or expression cassettes comprising the same may be comprised in vectors as described herein and as known in the art.

[0176] As used herein, “contact,” “contacting,” “contacted,” and grammatical variations thereof, refer to placing the components of a desired reaction together under conditions suitable for carrying out the desired reaction (e.g., transformation, transcriptional control, genome editing, nicking, and/or cleavage). As an example, a target nucleic acid may be contacted with a sequence-specific nucleic acid binding protein (e.g., polynucleotide-guided endonuclease, a CRISPR-Cas endonuclease (e.g., CRISPR-Cas effector protein), a zinc finger nuclease, a transcription activator-like effector nuclease (TALEN) and/or an Argonaute protein)) and a deaminase or a nucleic acid construct encoding the same, under conditions whereby the sequence-specific nucleic acid binding protein, the reverse transcriptase and/or the deaminase are expressed and the sequence-specific nucleic acid binding protein binds to the target nucleic acid, and the reverse transcriptase and/or deaminase may be fused to either the sequence-specific nucleic acid binding protein or recruited to the sequence-specific nucleic acid binding protein (via, for example, a peptide tag fused to the sequence-specific nucleic acid binding protein and an affinity tag fused to the reverse transcriptase and/or deaminase) and thus, the deaminase and/or reverse transcriptase is positioned in the vicinity of the target nucleic acid, thereby modifying the target nucleic acid. Other methods for recruiting reverse transcriptase and/or deaminase may be used that take advantage of other protein-protein interactions, and also RNA-protein interactions and chemical interactions may be used for protein-protein and protein-nucleic acid recruitment.

[0177] As used herein, “modifying” or “modification” in reference to a target nucleic acid includes editing (e.g., mutating), covalent modification, exchanging/substituting nucleic acids/nucleotide bases, deleting, cleaving, nicking, and/or altering transcriptional control of a target nucleic acid. In some embodiments, a modification may include one or more single base changes (SNPs) of any type.

[0178] “Introducing,” “introduce,” “introduced” (and grammatical variations thereof) in the context of a polynucleotide of interest means presenting a nucleotide sequence of interest (e.g., polynucleotide, RT template, a nucleic acid construct, and/or a guide nucleic acid) to a plant, plant part thereof, or cell thereof, in such a manner that the nucleotide sequence gains access to the interior of a cell.

[0179] The terms “transformation” or transfection” may be used interchangeably and as used herein refer to the introduction of a heterologous nucleic acid into a cell. Transformation of a cell may be stable or transient. Thus, in some embodiments, a host cell or host organism (e.g., a plant) may be stably transformed with a polynucleotide/nucleic acid molecule of the invention. In some embodiments, a host cell or host organism may be transiently transformed with a polynucleotide/nucleic acid molecule of the invention.

[0180] “Transient transformation” in the context of a polynucleotide means that a polynucleotide is introduced into the cell and does not integrate into the genome of the cell.

[0181] By “stably introducing” or “stably introduced” in the context of a polynucleotide introduced into a cell is intended that the introduced polynucleotide is stably incorporated into the genome of the cell, and thus the cell is stably transformed with the polynucleotide.

[0182] “Stable transformation” or “stably transformed” as used herein means that a nucleic acid molecule is introduced into a cell and integrates into the genome of the cell. As such, the integrated nucleic acid molecule is capable of being inherited by the progeny thereof, more particularly, by the progeny of multiple successive generations. “Genome” as used herein includes the nuclear and the plastid genome, and therefore includes integration of the nucleic acid into, for example, the chloroplast or mitochondrial genome. Stable transformation as used herein can also refer to a transgene that is maintained extrachromosomally, for example, as a minichromosome or a plasmid.

[0183] Transient transformation may be detected by, for example, an enzyme-linked immunosorbent assay (ELISA) or Western blot, which can detect the presence of a peptide or polypeptide encoded by one or more transgene introduced into an organism. Stable transformation of a cell can be detected by, for example, a Southern blot hybridization assay of genomic DNA of the cell with nucleic acid sequences which specifically hybridize with a nucleotide sequence of a transgene introduced into an organism (e.g., a plant). Stable transformation of a cell can be detected by, for example, a Northern blot hybridization assay of RNA of the cell with nucleic acid sequences which specifically hybridize with a nucleotide sequence of a transgene introduced into a host organism. Stable transformation of a cell can also be detected by, e.g., a polymerase chain reaction (PCR) or other amplification reactions as are well known in the art, employing specific primer sequences that hybridize with target sequence(s) of a transgene, resulting in amplification of the transgene sequence, which can be detected according to standard methods Transformation can also be detected by direct sequencing and/or hybridization protocols well known in the art.

[0184] Accordingly, in some embodiments, nucleotide sequences, polynucleotides, nucleic acid constructs, and/or expression cassettes of the invention may be expressed transiently and/or they can be stably incorporated into the genome of the host organism. Thus, in some embodiments, a nucleic acid construct of the invention (e.g., one or more expression cassettes comprising polynucleotides for editing as described herein) may be transiently introduced into a cell with a guide nucleic acid and as such, no DNA is maintained in the cell.

[0185] A nucleic acid construct of the invention may be introduced into a plant cell by any method known to those of skill in the art. Non-limiting examples of transformation methods include transformation via bacterial-mediated nucleic acid delivery (e.g., via Agrobacteria), viral-mediated nucleic acid delivery, silicon carbide or nucleic acid whisker-mediated nucleic acid delivery, liposome mediated nucleic acid delivery, microinjection, microparticle bombardment, calcium-phosphate-mediated transformation, cyclodextrin-mediated transformation, electroporation, nanoparticle-mediated transformation, sonication, infiltration, PEG-mediated nucleic acid uptake, as well as any other electrical, chemical, physical (mechanical) and/or biological mechanism that results in the introduction of nucleic acid into the plant cell, including any combination thereof. Procedures for transforming both eukaryotic and prokaryotic organisms are well known and routine in the art and are described throughout the literature (See, for example, Jiang et al. 2013. Nat. Biotechnol. 31:233-239; Ran et al. Nature Protocols 8:2281-2308 (2013)). General guides to various plant transformation methods known in the art include Miki et al. (“Procedures for Introducing Foreign DNA into Plants” in Methods in Plant Molecular Biology and Biotechnology, Glick, B. R. and Thompson, J. E., Eds. (CRC Press, Inc., Boca Raton, 1993), pages 67-88) and Rakowoczy-Trojanowska (Cell. Mol. Biol. Lett. 7:849-858 (2002)).

[0186] In some embodiments of the invention, transformation of a cell may comprise nuclear transformation. In other embodiments, transformation of a cell may comprise plastid transformation (e.g., chloroplast transformation). In still further embodiments, nucleic acids of the invention may be introduced into a cell via conventional breeding techniques. In some embodiments, one or more of the polynucleotides, expression cassettes and/or vectors may be introduced into a plant cell via Agrobacterium transformation.

[0187] A polynucleotide therefore can be introduced into a plant, plant part, plant cell in any number of ways that are well known in the art. The methods of the invention do not depend on a particular method for introducing one or more nucleotide sequences into a plant, only that they gain access to the interior the cell. Where more than polynucleotide is to be introduced, they can be assembled as part of a single nucleic acid construct, or as separate nucleic acid constructs, and can be located on the same or different nucleic acid constructs. Accordingly, the polynucleotide can be introduced into the cell of interest in a single transformation event, or in separate transformation events, or, alternatively, a polynucleotide can be incorporated into a plant as part of a breeding protocol.

[0188] Ubiquitin ligases are a part of the cellular machinery responsible for recognizing target proteins and promote substrate degradation. They are highly diverse key regulators within the key pathway leading to ubiquitylation of substrate proteins and degrade them via the 26s proteasome (Chen and Hellmann, Molecular Plant, 6(5):1388-1404 (2013)). Ubiquitin ligases are involved in several key processes including plant development, abiotic and biotic stress (Shu and Yang, Plant Cell Physiol. 58(9):1461-1476 (2017)), You et. al., Cell Host & Microbe 20:758-769 (2016)). Miller et al. (The Plant Cell 31:2370-2385 (2019)) have identified genetic variation in the promoter region of BnaUPL3.C03 from a panel of Brassica napus accessions that can influence seed size, lipid content and final crop yield. These authors identified a, mechanism in which reduced expression of BnaUPL3.C03, encoding a HECT E3 ubiquitin ligase, leads to elevated levels of LEAFY COTYLEDON 2 (LEC2), a transcription factor controlling seed maturation. This prolongs seed maturation processes, leading to increased seed size (e.g., seed area, seed weight) and lipid content (e.g., oil content). Miller et al. further found that Arabidopsis loss-of-function upl3 mutants (upl3-4 and upl3-5) had seeds approximately 10% larger than wild type and had a 12% increase in seed lipid content. In comparison, over-expression of AtUPL3 using the 35S promoter (35S:3HA-UPL3 transgenic) reduced seed size and lipid content. Interestingly, mutants in Brassica ram (the A genome donor to B. napus) of the UPL3 gene had larger seeds than the respective segregating wild type, thus indicating a potential role for UPL3 in regulating seed size in both Arabidopsis and Brassica species.

[0189] Accordingly, as described herein, editing technology is used to target endogenous HECT E3 UPL genes (e.g., HECT E3 UPL3 genes; e.g., HECT E3 UPL3a, HECT E3 UPL3b, HECT E3 UPL3c, HECT E3 UPL3d) in plants to provide plants having/exhibiting one or more improved yield traits, optionally increased seed size (e.g., seed area and/or seed weight) and/or increased seed oil content. Mutations that may be useful for producing plants with one or more improved yield traits include, for example, substitutions, deletions, insertions and/or inversions. In some aspects, a mutation generated by the editing technology can be a point mutation. In some aspects, a mutation generated as described herein may be a dominant negative mutation, a semi-dominant mutation, a null mutation, a hypermorphic mutation, a hypomorphic mutation or a weak loss-of-function mutation, optionally a null mutation or a dominant negative mutation.

[0190] In some embodiments, the invention provides a plant or plant part thereof comprising at least one (e.g., one or more) non-natural mutation in an endogenous Homologous to E6AP C-Terminus (HECT) E3 Ubiquitin Protein Ligase (UPL) gene encoding a HECT E3 UPL polypeptide. In some embodiments, the at least one non-natural mutation provides a dominant negative mutation, a semi-dominant mutation, a null mutation, a hypermorphic mutation, a hypomorphic mutation and/or a weak loss-of-function mutation, optionally wherein the at least one non-natural mutation provides a null mutation or a dominant negative mutation.

[0191] In some embodiments, a plant cell is provided, the plant cell comprising an editing system, the editing system comprising: (a) a CRISPR-Cas effector protein; and (b) a guide nucleic acid (e.g., gRNA, gDNA, crRNA, crDNA, sgRNA, sgDNA) comprising a spacer sequence with complementarity to an endogenous target gene encoding a HECT E3 UPL protein. The editing system may be used to generate a mutation in the endogenous target gene encoding a HECT E3 UPL protein. In some embodiments, the mutation is a non-natural mutation. In some embodiments, a guide nucleic acid of an editing system may comprise the nucleotide sequence (a spacer sequence, e.g., one or more spacers) of any of SEQ ID NOs:94-118 (e.g., SEQ ID NO:94 (PWsp1159), SEQ ID NO:95 (PWsp1160), SEQ ID NO:96 (PWsp1161), SEQ ID NO:97 (PWsp1162), SEQ ID NO:98 (PWsp1236), SEQ ID NO:99 (PWsp1237), SEQ ID NO:100 (PWsp1238), SEQ ID NO:101 (PWsp1239), SEQ ID NO:102 (PWsp1384), SEQ ID NO:103 (PWsp1385), SEQ ID NO:104 (PWsp1386), SEQ ID NO:105 (PWsp1387), SEQ ID NO:106 (PWsp1388), SEQ ID NO:107 (PWsp1389), SEQ ID NO:108 (PWsp1390), SEQ ID NO:109 (PWsp1391), SEQ ID NO:110 (PWsp1392), SEQ ID NO:111 (PWsp1393), SEQ ID NO:112 (PWsp1394), SEQ ID NO:113 (PWsp1397), SEQ ID NO:114 (PWsp1398), SEQ ID NO:115 (PWsp1399), SEQ ID NO:116 (PWsp1340), SEQ ID NO:117 (PWsp1401), and/or SEQ ID NO:118 (PWsp1402)).

[0192] The mutation in a HECT E3 UPL gene of the plant, plant part thereof or the plant cell may be any type of mutation, including a base substitution, a base deletion, a base insertion and/or an inversion. In some embodiments, a non-natural mutation may comprise a base substitution to an A, a T, a G, or a C, optionally the base substitution may be from a G to a C. In some embodiments, a non-natural mutation may be a deletion of at least one base pair (e.g., 1 base pair to about 5 base pairs; e.g., 1, 2, 3, 4, 5 consecutive base pairs) or an insertion of at least one base pair (e.g., 1 base pair to about 5 base pairs; e.g., 1, 2, 3, 4, 5 consecutive base pairs), optionally an out-of-frame of in-frame deletion or insertion. In some embodiments, a non-natural mutation may be a deletion of at least 5 base pairs to about 100 base pairs or more (e.g., 5, 6, 7, 8, 9, 10, 11, 12, 13, 14, 15, 16, 17, 18, 19, 20, 21, 22, 23, 24, 25, 26, 27, 28, 29, 30, 31, 32, 33, 34, 35, 36, 37, 38, 39, 40, 41, 42, 43, 44, 45, 46, 47, 48, 49, 50, 51, 52, 53, 54, 55, 56, 57, 58, 59, 60, 61, 62, 63, 64, 65, 66, 67, 68, 69, 70, 71, 72, 73, 74, 75, 76, 77, 78, 79, 80, 81, 82, 83, 84, 85, 86, 87, 88, 89, 90, 91, 92, 93, 94, 95, 96, 97, 98, 99, 100 or more consecutive base pairs), optionally an out-of-frame of in-frame deletion. In some embodiments, a non-natural mutation may be an inversion of at about 10 to about 2000 consecutive base pairs of a HECT E3 UPL gene.

[0193] In some embodiments, a mutation of a HECT E3 UPL gene is within a portion of the endogenous HECT E3 UPL gene that encodes the HECT E3 UPL polypeptide (e.g., the coding regions (exons)). As an example, the mutation may be in the region of the HECT E3 UPL gene that encodes the active/catalytic site of the HECT E3 UPL polypeptide, optionally wherein the mutation results in the HECT E3 UPL polypeptide having an amino acid substitution as compared to a wild type mature HECT E3 UPL peptide (e.g., Cys>Ser). In some embodiments, a catalytic site variant may be obtained by generating an in-frame deletion or in-frame insertion. In some embodiments, a mutation in a HECT E3 UPL gene is an out-of-frame deletion or an out-of-frame insertion that results in, for example, a premature stop codon. In some embodiments, at least one non-natural mutation in an endogenous HECT E3 UPL3 gene may result in a mutation in the N-terminal region of the encoded HECT E3 UPL3 polypeptide. In some embodiments, the mutation in the region of the HECT E3 UPL gene that encodes the HECT E3 UPL polypeptide may be an inversion of at least 10 to about 2000 consecutive nucleotides (e.g., inversion of consecutive nucleotides from an exon or portion thereof), optionally an inversion of at least 10 to about 15, 16, 17, 18, 19, 20, 21, 22, 23, 24, 25, 26, 27, 28, 29, 30, 31, 32, 33, 34, 35, 36, 37, 38, 39, 40, 41, 42, 43, 44, 45, 46, 47, 48, 49, 50, 51, 52, 53, 54, 55, 56, 57, 58, 59, 60, 61, 62, 63, 64, 65, 66, 67, 68, 69, 70, 71, 72, 73, 74, 75, 76, 77, 78, 79, 80, 81, 82, 83, 84, 85, 86, 87, 88, 89, 90, 91, 92, 93, 94, 95, 96, 97, 98, 99, 100, 110, 120, 130, 140, 150, 160, 170, 180, 190, or 200 or more consecutive base pairs.

[0194] The types of editing tools that may be used to generate these and other mutations in HECT E3 UPL genes include any base editors or cutters, which are guided to a target site using spacers having at least 80% complementarity to a portion of an HECT E3 UPL gene as described herein.

[0195] In some embodiments, a mutation of a HECT E3 UPL gene (e.g., a HECT E3 UPL3 gene) is within a portion of the endogenous HECT E3 UPL gene that encodes the N-terminal region of the HECT E3 UPL polypeptide (e.g., HECT E3 UPL3 polypeptide), wherein the N-terminal region of the HECT E3 UPL polypeptide comprises, for example, (a) a sequence having at least 80% sequence identity to any one of SEQ ID NOs:84-87, and/or (b) an amino acid sequence having at least 80% sequence identity to a region of consecutive amino acid residues: from residue 50 to residue 95, residue 43 to residue 102, and/or residue 36 to residue 109 with reference to the residue numbering of SEQ ID NO:78, from residue 48 to residue 87, residue 41 to residue 94, and/or residue 34 to residue 101 with reference to the residue numbering of SEQ ID NO:79, from residue 139 to residue 194, residue 132 to residue 201, and/or residue 125 to residue 208 with reference to the residue numbering of SEQ ID NO:80, and/or from residue 104 to residue 146, residue 97 to residue 153, and/or residue 90 to residue 160 with reference to the residue numbering of SEQ ID NO:81.

[0196] In some embodiments, a mutation may be in an active/catalytic site of the HECT E3 UPL polypeptide (e.g., HECT E3 UPL3 polypeptide) encoded by the endogenous HECT E3 UPL gene (e.g., a HECT E3 UPL3 gene), optionally wherein the active site is in a region of the HECT E3 UPL polypeptide comprising: (a) an amino acid sequence having at least 80% identity to any one of SEQ ID NO:88-93) and/or (b) an amino acid sequence having at least 80% sequence identity to a region of consecutive amino acid residues: from residue 1814 to residue 1865, residue 1822 to residue 1857, and/or residue 1829 to residue 1851 with reference to the residue numbering of SEQ ID NO:78, from residue 1820 to residue 1870, residue 1827 to residue 1863, and/or residue 1834 to residue 1856 with reference to the residue numbering of SEQ ID NO:79, from residue 1838 to residue 1888, residue 1845 to residue 1881, and/or residue 1852 to residue 1874 with reference to the residue numbering of SEQ ID NO:80, from residue 1834 to residue 1884, residue 1841 to residue 1877, and/or residue 1848 to residue 1870 with reference to the residue numbering of SEQ ID NO:81, from residue 1783 to residue 1833, residue 1790 to residue 1826, and/or residue 1797 to residue 1818 with reference to the residue numbering of SEQ ID NO:82, or from residue 1776 to residue 1826, residue 1783 to residue 1819, and/or residue 1790 to residue 1812 with reference to the residue numbering of SEQ ID NO:83.

[0197] In some embodiments, a mutation in an active/catalytic site of the HECT E3 UPL gene (e.g., a HECT E3 UPL3 gene) may result in a substituted amino acid residue, optionally wherein the substitution of an amino acid residue is located: at position 1839 with reference to amino acid position numbering of SEQ ID NO:78, at position 1844 with reference to amino acid position numbering of SEQ ID NO:79, at position 1862 with reference to amino acid position numbering of SEQ ID NO:80, at position 1858 with reference to amino acid position numbering of SEQ ID NO:81, at position 1807 with reference to amino acid position numbering of SEQ ID NO:82, or at position 1800 with reference to amino acid position numbering of SEQ ID NO:83. In some embodiments, the substitution may be a cysteine to a serine.

[0198] An endogenous HECT E3 UPL gene useful with this invention (e.g., an endogenous target gene) encodes a Homologous to E6AP C-Terminus (HECT) E3 Ubiquitin Protein Ligase (UPL) protein, optionally a HECT E3 UPL3 protein (e.g., HECT E3 UPL3a, HECT E3 UPL3b HECT E3 UPL3c, HECT E3 UPL3d). In some embodiments, an endogenous HECT E3 UPL gene (e.g., target gene; e.g., a HECT E3 UPL3 gene) may comprise a sequence having at least 80% sequence identity to any one of the nucleotide sequences of SEQ ID NOs: 72-77, and/or may encode a polypeptide that (a) comprises a sequence having at least 80% sequence identity to any one of the amino acid sequences of SEQ ID NOs:78-83, (b) comprises a region having at least 80% sequence identity to any one of the amino acid sequences of SEQ ID NOs:84-92, and/or (c) comprises a region having at least 90% identity to SEQ ID NO:93.

[0199] An exemplary non-natural mutation in a HECT E3 UPL gene may provide a mutated HECT E3 UPL gene (e.g., a mutated HECT E3 UPL3 gene) and/or may encode a mutated HECT E3 UPL protein (e.g., a mutated HECT E3 UPL3 protein).

[0200] In some embodiments, a plant (e.g., a corn plant, a soybean plant) comprising at least one (e.g., one or more) non-natural mutation in an endogenous HECT E3 UPL (e.g., HECT E3 UPL3) gene exhibits one or more improved yield traits as compared to a plant devoid of the at least one mutation (e.g., an isogenic plant (e.g., wild type unedited plant or a null segregant). In some embodiments, the one or more improved yield traits can include, but is not limited to, higher yield (bu/acre), increased kernel row number, optionally wherein ear length is not substantially reduced, increased kernel number, increased kernel size, increased ear length, decreased tiller number, decreased tassel branch number, increased number of pods per node, increased number of pods per plant, increased seed weight and/or increased seed oil content as compared to a control plant devoid of the at least one non-natural mutation. In some embodiments, the plant comprising at least one mutation in an endogenous HECT E3 UPL gene is a plant which exhibits a phenotype of one or more improved yield traits, optionally increased seed size (e.g., area, weight) and/or increased seed oil content, as compared to a plant devoid of the same HECT E3 UPL mutation. In some embodiments, a plant may be regenerated from a plant part and/or plant cell of the invention comprising a mutation in a HECT E3 UPL gene as described herein, wherein the regenerated plant comprises the mutation in the endogenous HECT E3 UPL gene and a phenotype of improvement in one or more yield traits, as compared to a plant devoid of the same mutation in the HECT E3 UPL gene.

[0201] As used herein, the term “without substantially decreasing the length of the ears” refers to the length of an ear having increased kernel row number as a result of one or more mutations in one or more HECT E3 UPL genes as described herein, wherein the length of the ear is not decreased by more than about 5, 6, 7, 8, 9, 10, 11, 12, 13, 14, 15, 16, 17, 18, 19, 20, 21, 22, 23, 24, 25, 26, 27, 28, 29, or 30% as compared to an ear of a plant devoid of the same mutation(s) in the same HECT E3 UPL gene(s).

[0202] In some embodiments, a plant cell is provided, the plant cell comprising at least one (e.g., one or more) non-natural mutation within an endogenous Homologous to E6AP C-Terminus (HECT) E3 Ubiquitin Protein Ligase (UPL) gene, wherein the mutation is a substitution, insertion, deletion or inversion that is introduced using an editing system that comprises a nucleic acid binding domain that binds to a target site in the endogenous HECT E3 UPL gene, optionally wherein the endogenous HECT E3 UPL gene is an endogenous HECT E3 UPL3 gene (e.g., a HECT E3 UPL3a gene, a HECT E3 UPL3b gene, a HECT E3 UPL3c gene, a HECT E3 UPL3d gene). In some embodiments, the substitution, insertion, deletion or an inversion results in, for example, a dominant negative allele or a null allele. In some embodiments, the at least one non-natural mutation is a point mutation. In some embodiments, the at least one non-natural mutation within the HECT E3 UPL gene is an insertion and/or a deletion, optionally the at least one non-natural mutation is an out-of-frame insertion or deletion or an in-frame insertion or deletion, optionally wherein the out-of-frame insertion or deletion results in a premature stop codon. In some embodiments, the target site in the HECT E3 UPL gene is within a region of the HECT E3 UPL gene, the region (a) encoding a sequence having at least 80% sequence identity to an amino acid sequence of any one of SEQ ID NOs:84-92, (b) encoding a sequence having at least 80% sequence identity to a region of consecutive amino acid residues: from residue 50 to residue 95, residue 43 to residue 102, residue 36 to residue 109, residue 1814 to residue 1865, residue 1822 to residue 1857, and/or residue 1829 to residue 1851 with reference to the residue numbering of SEQ ID NO:78, from residue 48 to residue 87, residue 41 to residue 94, residue 34 to residue 101, residue 1820 to residue 1870, residue 1827 to residue 1863, and/or residue 1834 to residue 1856 with reference to the residue numbering of SEQ ID NO:79, from residue 139 to residue 194, residue 132 to residue 201, residue 125 to residue 208, residue 1838 to residue 1888, residue 1845 to residue 1881, and/or residue 1852 to residue 1874 with reference to the residue numbering of SEQ ID NO:80, from residue 104 to residue 146, residue 97 to residue 153, residue 90 to residue 160, residue 1834 to residue 1884, residue 1841 to residue 1877, and/or residue 1848 to residue 1870 with reference to the residue numbering of SEQ ID NO:81, from residue 1783 to residue 1833, residue 1790 to residue 1826, and/or residue 1797 to residue 1818 with reference to the residue numbering of SEQ ID NO:82, and/or from residue 1776 to residue 1826, residue 1783 to residue 1819, and/or residue 1790 to residue 1812 with reference to the residue numbering of SEQ ID NO:83; and/or (c) encoding a sequence having at least 90% sequence identity to the amino acid sequence of SEQ ID NO:93. In some embodiments, the mutation is made following cleavage by an editing system that comprises a nuclease and a nucleic acid binding domain that binds to a target site within a sequence having least 80% sequence identity to a sequence encoding of any one of SEQ ID NOs:84-92 or having at least 90% sequence identity to a sequence encoding SEQ ID NO:93, and the at least one non-natural mutation within a HECT E3 UPL gene is made following cleavage by the nuclease. In some embodiments, the at least one non-natural mutation a modified amino acid residue located: at position 1839 with reference to amino acid position numbering of SEQ ID NO:78, at position 1844 with reference to amino acid position numbering of SEQ ID NO:79, at position 1862 with reference to amino acid position numbering of SEQ ID NO:80, at position 1858 with reference to amino acid position numbering of SEQ ID NO:81, at position 1807 with reference to amino acid position numbering of SEQ ID NO:82, or at position 1800 with reference to amino acid position numbering of SEQ ID NO:83. In some embodiments, the HECT E3 UPL gene is a HECT E3 UPL3 gene, optionally a HECT E3 UPL3a gene, a HECT E3 UPL3b gene, a HECT E3 UPL3c gene, a HECT E3 UPL3d gene. In some embodiments, the plant cell is regenerated into a plant that comprises the at least one non-natural mutation and the mutation results in a dominant negative allele or a null allele. In some embodiments, the plant regenerated from the plant cell exhibits a phenotype of at least one (one or more) improved yield trait when compared to a wild-type plant not comprising/devoid of the allele (e.g., an isogenic wild type plant), optionally wherein the one or more improved yield traits includes higher yield (bu/acre), increased kernel row number, optionally wherein ear length is not substantially reduced, increased kernel number, increased kernel size (e.g., increased area and/or increased weight), increased ear length, decreased tiller number, decreased tassel branch number, increased number of pods per node, increased number of pods per plant, increased seed weight, increase seed area, and/or increased seed oil content as compared to a control plant devoid of the at least one non-natural mutation. In some embodiments, the plant regenerated from the plant cell exhibits a phenotype of seeds having increased seed weight/size and/or increased seed oil content.

[0203] In some embodiments, a method of producing/breeding a transgene-free edited plant (e.g., a corn plant, a soybean plant) is provided, the method comprising: crossing a plant of the present invention (e.g., a plant comprising one or more mutations (e.g., non-natural mutations) in one or more HECT E3 UPL genes and having increased kernel row number) with a transgene free plant, thereby introducing the mutation into the plant that is transgene-free; and selecting a progeny plant that comprises the mutation and is transgene-free, thereby producing a transgene free edited plant.

[0204] Also provided herein is a method of providing a plurality of plants (e.g., corn plants, soybean plants) having one or more improved yield traits, the method comprising planting two or more plants of the invention (e.g., 2, 3, 4, 5, 6, 7, 8, 9, 10 or more plants comprising one or more mutations (e.g., non-natural mutations) in one or more HECT E3 UPL genes, optionally, in one or more HECT E3 UPL polypeptides and having one or more improved yield traits in a growing area (e.g., a field (e.g., a cultivated field, an agricultural field), a growth chamber, a greenhouse, a recreational area, a lawn, and/or a roadside and the like), thereby providing a plurality of plants having one or more improved yield traits as compared to a plurality of control plants devoid of the mutation.

[0205] The invention further provides a method of generating variation in a region of a Homologous to E6AP C-Terminus (HECT) E3 Ubiquitin Protein Ligase (UPL) polypeptide, comprising: introducing an editing system into a plant cell, wherein the editing system is targeted to a region of a HECT E3 UPL gene that encodes the region of the HECT E3 UPL polypeptide, wherein the region of the HECT E3 UPL polypeptide comprises (a) a sequence having at least 80% sequence identity to an amino acid sequence of any one of SEQ ID NOs:84-92, (b) a sequence having at least 80% sequence identity to a region of consecutive amino acid residues: from residue 50 to residue 95, residue 43 to residue 102, residue 36 to residue 109, residue 1814 to residue 1865, residue 1822 to residue 1857, and/or residue 1829 to residue 1851 with reference to the residue numbering of SEQ ID NO:78, from residue 48 to residue 87, residue 41 to residue 94, residue 34 to residue 101, residue 1820 to residue 1870, residue 1827 to residue 1863, and/or residue 1834 to residue 1856 with reference to the residue numbering of SEQ ID NO:79, from residue 139 to residue 194, residue 132 to residue 201, residue 125 to residue 208, residue 1838 to residue 1888, residue 1845 to residue 1881, and/or residue 1852 to residue 1874 with reference to the residue numbering of SEQ ID NO:80, from residue 104 to residue 146, residue 97 to residue 153, residue 90 to residue 160, residue 1834 to residue 1884, residue 1841 to residue 1877, and/or residue 1848 to residue 1870 with reference to the residue numbering of SEQ ID NO:81, from residue 1783 to residue 1833, residue 1790 to residue 1826, and/or residue 1797 to residue 1818 with reference to the residue numbering of SEQ ID NO:82, and/or from residue 1776 to residue 1826, residue 1783 to residue 1819, and/or residue 1790 to residue 1812 with reference to the residue numbering of SEQ ID NO:83; or (c) comprises a sequence having at least 90% sequence identity to the amino acid sequence of SEQ ID NO:93; contacting the region of the HECT E3 UPL gene with the editing system, thereby introducing into the plant cell a mutation into the region of the HECT E3 UPL polypeptide; and generating variation in the region of the HECT E3 UPL polypeptide. In some embodiments, the mutation may be made following cleavage by the editing system that comprises a nuclease and a nucleic acid binding domain that binds to a target site within a sequence having at least 80% sequence identity to any one of the nucleotide sequences of SEQ ID NO:72-77. In some embodiments, contacting the region of the HECT E3 UPL gene in the plant cell with the editing system produces a plant cell comprising in its genome an edited endogenous HECT E3 UPL gene, the method further comprising (a) regenerating a plant from the plant cell; (b) selfing the plant to produce progeny plants (E1); (c) assaying the progeny plants of (b) for one or more improved yield traits; and (d) selecting the progeny plants exhibiting the one or more improved yield traits to produce selected progeny plants exhibiting the one or more improved yield traits as compared to a control plant. In some embodiments, the method may further comprise (e) selfing the selected progeny plants of (d) to produce progeny plants (E2); (0 assaying the progeny plants of (e) for one or more improved yield traits; and (g) selecting the progeny plants exhibiting the one or more improved yield traits to produce selected progeny plants exhibiting the one or more improved yield traits as compared to a control plant, optionally repeating (e) through (g) one or more additional times. In some embodiments, the HECT E3 UPL gene is a HECT E3 UPL3 gene, optionally a HECT E3 UPL3a gene, a HECT E3 UPL3b gene, a HECT E3 UPL3c gene, a HECT E3 UPL3d gene.

[0206] In some embodiments, a mutated HECT E3 UPL gene produced by the methods of the invention may comprise a sequence having at least 90% sequence identity to any one of SEQ ID NOs:119-125. In some embodiments, a plant (e.g., a soybean plant, corn plant) may comprise one or more (e.g., 1, 2, 3, 4, 5, 6 or more) mutated HECT E3 UPL genes as described herein, including, but not limited to, the mutated HECT E3 UPL genes having at least 90% sequence identity to SEQ ID NOs:119-125. As an example, a soybean plant edited as described herein may comprise (1) SEQ ID NO:119, (2) SEQ ID NO:120, (3) SEQ ID NO:121, (4) SEQ ID NO:120, and/or SEQ ID NO:121, or a corn plant edited as described herein may comprise (1) SEQ ID NO:122, (2) SEQ ID NO:123, (3) SEQ ID NO:124, and/or (4) SEQ ID NO:125, optionally wherein the edited plant may be heterozygous or homozygous, or a combination thereof, for one or more mutation(s) at any given allele. In some embodiments, a plant may be heterozygous and comprise a mutation in one allele of a HECT E3 UPL gene at a particular locus in its genome and be wild type at the same locus in the second copy of the same gene. In some embodiments, in a specific HECT E3 UPL locus, a plant may comprise a different mutation at each allele for a particular HECT E3 UPL gene or may comprise the same mutation at each allele.

[0207] In some embodiments, a method for editing a specific site in the genome of a plant cell is provided, the method comprising: cleaving, in a site-specific manner, a target site within an endogenous Homologous to E6AP C-Terminus (HECT) E3 Ubiquitin Protein Ligase (UPL) gene in the plant cell, the endogenous HECT E3 UPL gene: (a) comprising a sequence having at least 80% sequence identity to any one of the nucleotide sequences of SEQ ID NOs:72-77, (b) encoding a sequence having at least 80% sequence identity to an amino acid sequence of any one of SEQ ID NOs:78-83, (c) encoding a region having at least 80% sequence identity to an amino acid sequence of any one of SEQ ID NOs:84-92, and/or (d) encoding a region having at least 90% identity to the amino acid sequence of SEQ ID NO:93, thereby generating an edit in the endogenous HECT E3 UPL gene of the plant cell and producing a plant cell comprising the edit in the endogenous HECT E3 UPL gene, optionally wherein the HECT E3 UPL gene is a HECT E3 UPL3 gene, optionally a HECT E3 UPL3a gene, a HECT E3 UPL3b gene, a HECT E3 UPL3c gene, and/or a HECT E3 UPL3d gene. In some embodiments, the edit(s) result in a mutated HECT E3 UPL gene having at least 90% sequence identity to any one of the nucleotide sequences of SEQ ID NOs:119-125.

[0208] In some embodiments, the edit results in a non-natural mutation, including but not limited to a deletion, substitution, insertion or inversion, wherein the edit may result in a null mutation, a dominant negative mutation, a semi-dominant mutation, a hypermorphic mutation, a hypomorphic mutation, or a weak loss-of-function mutation, optionally a null mutation or a dominant negative mutation. In some embodiments, the edit may be a nucleotide substitution of a G to a C (G>C). In some embodiments, an edit results in variation of amino acids in the coding region of the HECT E3 UPL protein. As an example, an edit may result in variation in the amino acid residues located: at position 1839 with reference to amino acid position numbering of SEQ ID NO:78, at position 1844 with reference to amino acid position numbering of SEQ ID NO:79, at position 1862 with reference to amino acid position numbering of SEQ ID NO:80, at position 1858 with reference to amino acid position numbering of SEQ ID NO:81, at position 1807 with reference to amino acid position numbering of SEQ ID NO:82, or at position 1800 with reference to amino acid position numbering of SEQ ID NO:83. In some embodiments, the edit produces an amino acid substitution in a HECT E3 UPL polypeptide of a Cysteine (C) to a serine (S).

[0209] In some embodiments, a method of editing may further comprise regenerating a plant from the plant cell comprising the edit in the endogenous HECT E3 UPL gene (e.g., an endogenous HECT E3 UPL3 gene), thereby producing a plant comprising the edit in its endogenous HECT E3 UPL gene and having a phenotype of one or more improved yield traits when compared to a control plant that is devoid of the edit, optionally wherein the edited HECT E3 UPL gene comprises a sequence having at least 90% sequence identity to any one of SEQ ID NOs:119-125.

[0210] In some embodiments, a method for making a plant is provided, comprising: (a) contacting a population of plant cells comprising an endogenous Homologous to E6AP C-Terminus (HECT) E3 Ubiquitin Protein Ligase (UPL) gene with a nuclease linked to a nucleic acid binding domain (e.g., editing system) that binds to a sequence (a) having at least 80% sequence identity to the nucleotide sequence of any one of SEQ ID NOs:72-77, (b) encoding an amino acid sequence having at least 80% sequence identity to any one of SEQ ID NOs:78-83, (c) encoding an amino acid sequence comprising a region having at least 80% sequence identity to any one of SEQ ID NOs:84-92, and/or (d) encoding an amino acid sequence comprising a region having at least 90% identity to the amino acid sequence of SEQ ID NO:93; (b) selecting a plant cell from the population in which an endogenous HECT E3 UPL gene has been mutated, thereby producing a plant cell comprising a mutation in the endogenous HECT E3 UPL gene; and (c) growing the selected plant cell into a plant, optionally wherein the HECT E3 UPL gene is a HECT E3 UPL3 gene, optionally a HECT E3 UPL3a gene, a HECT E3 UPL3b gene, a HECT E3 UPL3c gene, a HECT E3 UPL3d gene.

[0211] In some embodiments, a method of improving one or more yield traits in a plant is provided, the method comprising (a) contacting a plant cell comprising an endogenous Homologous to E6AP C-Terminus (HECT) E3 Ubiquitin Protein Ligase (UPL) gene with a nuclease targeting the endogenous HECT E3 UPL gene, wherein the nuclease is linked to a nucleic acid binding domain (e.g., editing system) that binds to a target site in the endogenous HECT E3 UPL gene, wherein the endogenous HECT E3 UPL gene: (i) comprises a sequence having at least 80% sequence identity to the nucleotide sequence of any one of SEQ ID NOs:72-77; (ii) encodes an amino acid sequence having at least 80% sequence identity to any one of SEQ ID NOs:78-83; (iii) encodes an amino acid sequence comprising a region having at least 80% sequence identity to any one of SEQ ID NOs:84-92; and/or (iv) encodes an amino acid sequence comprising a region having at least 90% identity to the amino acid sequence of SEQ ID NO:93 to produce a plant cell comprising a mutation in the endogenous HECT E3 UPL gene; and (b) growing the plant cell into a plant comprising the mutation in the endogenous HECT E3 UPL gene, thereby producing a plant have a mutated endogenous HECT E3 UPL gene and one or more improved yield traits, optionally wherein the HECT E3 UPL gene is a HECT E3 UPL3 gene, optionally a HECT E3 UPL3a gene, a HECT E3 UPL3b gene, a HECT E3 UPL3c gene, a HECT E3 UPL3d gene.

[0212] In some embodiments, a method for producing a plant or part thereof comprising at least one cell having a mutated endogenous HECT E3 UPL gene is provided, the method comprising contacting a target site in an endogenous HECT E3 UPL gene in the plant or plant part with a nuclease comprising a cleavage domain and a nucleic acid binding domain, wherein the nucleic acid binding domain binds to a target site in the endogenous HECT E3 UPL gene, wherein the endogenous HECT E3 UPL gene (a) comprises a sequence having at least 80% sequence identity to the nucleotide sequence of any one of SEQ ID NOs:72-77; (b) encodes an amino acid sequence having at least 80% sequence identity to any one of SEQ ID NOs:78-83; (c) encodes an amino acid sequence comprising a region having at least 80% sequence identity to any one of SEQ ID NOs:84-92; and/or (d) encodes an amino acid sequence comprising a region having at least 90% identity to the amino acid sequence of SEQ ID NO:93, thereby producing the plant or part thereof comprising at least one cell having a mutation in the endogenous HECT E3 UPL gene, optionally wherein the HECT E3 UPL gene is a HECT E3 UPL3 gene, optionally a HECT E3 UPL3a gene, a HECT E3 UPL3b gene, a HECT E3 UPL3c gene, a HECT E3 UPL3d gene.

[0213] Also provided herein is a method for producing a plant or part thereof comprising a mutated endogenous HECT E3 UPL gene and exhibiting one or more improved yield traits, the method comprising contacting a target site in an endogenous HECT E3 UPL gene in the plant or plant part with a nuclease comprising a cleavage domain and a nucleic acid binding domain, wherein the nucleic acid binding domain binds to a target site in the endogenous HECT E3 UPL gene, wherein the endogenous HECT E3 UPL gene: (a) comprises a sequence having at least 80% sequence identity to the nucleotide sequence of any one of SEQ ID NOs:72-77; (b) encodes an amino acid sequence having at least 80% sequence identity to any one of SEQ ID NOs:78-83; (c) encodes an amino acid sequence comprising a region having at least 80% sequence identity to any one of SEQ ID NOs:84-92; and/or (d) encodes an amino acid sequence comprising a region having at least 90% identity to the amino acid sequence of SEQ ID NO:93, thereby producing the plant or part thereof comprising an endogenous HECT E3 UPL gene having a mutation and exhibiting one or more improved yield traits, optionally wherein the one or more improved yield traits includes higher yield (bu/acre), increased kernel row number, optionally wherein ear length is not substantially reduced, increased kernel number, increased kernel size, increased ear length, decreased tiller number, decreased tassel branch number, increased number of pods per node, increased number of pods per plant, and/or increased seed weight as compared to a control plant devoid of the at least one non-natural mutation. In some embodiments, the improved yield trait can include but is not limited to, increased seed size (e.g., area, weight) and/or increased seed oil content. In some embodiments, the HECT E3 UPL gene is a HECT E3 UPL3 gene, optionally a HECT E3 UPL3a gene, a HECT E3 UPL3b gene, a HECT E3 UPL3c gene, a HECT E3 UPL3d gene. In some embodiments, the plant or part thereof edited as described herein comprises a mutated endogenous HECT E3 UPL gene having at least 90% sequence identity to any one of the nucleotide sequences of SEQ ID NOs:119-125.

[0214] In some embodiments, a nuclease may cleave an endogenous HECT E3 UPL gene (e.g., an endogenous HECT E3 UPL3 gene), thereby introducing the mutation into the endogenous HECT E3 UPL gene. A nuclease useful with the invention may be any nuclease that can be utilized to edit/modify a target nucleic acid. Such nucleases include, but are not limited to a zinc finger nuclease, transcription activator-like effector nucleases (TALEN), endonuclease (e.g., Fok1) and/or a CRISPR-Cas effector protein. Likewise, any nucleic acid binding domain useful with the invention may be any DNA binding domain or RNA binding domain that can be utilized to edit/modify a target nucleic acid. Such nucleic acid binding domains include, but are not limited to, a zinc finger, transcription activator-like DNA binding domain (TAL), an argonaute and/or a CRISPR-Cas effector DNA binding domain.

[0215] In some embodiments, a nucleic acid binding domain (e.g., DNA binding domain) is comprised in a nucleic acid binding polypeptide. A “nucleic acid binding protein” or “nucleic acid binding polypeptide” as used herein refers to a polypeptide that binds and/or is capable of binding a nucleic acid in a site- and/or sequence-specific manner. In some embodiments, a nucleic acid binding polypeptide may be a sequence-specific nucleic acid binding polypeptide (e.g., a sequence-specific DNA binding domain) such as, but not limited to, a sequence-specific binding polypeptide and/or domain from, for example, a polynucleotide-guided endonuclease, a CRISPR-Cas effector protein (e.g., a CRISPR-Cas endonuclease), a zinc finger nuclease, a transcription activator-like effector nuclease (TALEN) and/or an Argonaute protein. In some embodiments, a nucleic acid binding polypeptide comprises a cleavage polypeptide (e.g., a nuclease polypeptide and/or domain) such as, but not limited to, an endonuclease (e.g., Fok1), a polynucleotide-guided endonuclease, a CRISPR-Cas endonuclease, a zinc finger nuclease, and/or a transcription activator-like effector nuclease (TALEN). In some embodiments, the nucleic acid binding polypeptide associates with and/or is capable of associating with (e.g., forms a complex with) one or more nucleic acid molecule(s) (e.g., forms a complex with a guide nucleic acid as described herein) that can direct or guide the nucleic acid binding polypeptide to a specific target nucleotide sequence (e.g., a gene locus of a genome) that is complementary to the one or more nucleic acid molecule(s) (or a portion or region thereof), thereby causing the nucleic acid binding polypeptide to bind to the nucleotide sequence at the specific target site. In some embodiments, the nucleic acid binding polypeptide is a CRISPR-Cas effector protein as described herein. In some embodiments, reference is made to specifically to a CRISPR-Cas effector protein for simplicity, but a nucleic acid binding polypeptide as described herein may be used. In some embodiments, a polynucleotide and/or a nucleic acid construct of the invention can be an “expression cassette” or can be comprised within an expression cassette.

[0216] In some embodiments, a method of editing an endogenous HECT E3 UPL gene in a plant or plant part is provided, the method comprising contacting a target site in an HECT E3 UPL gene in the plant or plant part with a cytosine base editing system comprising a cytosine deaminase and a nucleic acid binding domain that binds to a target site in the HECT E3 UPL gene, the HECT E3 UPL gene, wherein the endogenous HECT E3 UPL gene: (a) comprises a sequence having at least 80% sequence identity to the nucleotide sequence of any one of SEQ ID NOs:72-77; (b) encodes an amino acid sequence having at least 80% sequence identity to any one of SEQ ID NOs:78-83; (c) encodes an amino acid sequence comprising a region having at least 80% sequence identity to any one of SEQ ID NOs:84-92; and/or (d) encodes an amino acid sequence comprising a region having at least 90% identity to the amino acid sequence of SEQ ID NO:93, thereby editing the endogenous HECT E3 UPL gene in the plant or part thereof and producing a plant or part thereof comprising at least one cell having a mutation in the endogenous HECT E3 UPL gene.

[0217] In some embodiments, a method of editing an endogenous HECT E3 UPL gene in a plant or plant part is provided, the method comprising contacting a target site in an HECT E3 UPL gene in the plant or plant part with an adenosine base editing system comprising an adenosine deaminase and a nucleic acid binding domain that binds to a target site in the HECT E3 UPL gene, the HECT E3 UPL gene (a) comprises a sequence having at least 80% sequence identity to the nucleotide sequence of any one of SEQ ID NOs:72-77; (b) encodes an amino acid sequence having at least 80% sequence identity to any one of SEQ ID NOs:78-83; (c) encodes an amino acid sequence comprising a region having at least 80% sequence identity to any one of SEQ ID NOs:84-92; and/or (d) encodes an amino acid sequence comprising a region having at least 90% identity to the amino acid sequence of SEQ ID NO:93, thereby editing the endogenous HECT E3 UPL gene in the plant or part thereof and producing a plant or part thereof comprising at least one cell having a mutation in the endogenous HECT E3 UPL gene.

[0218] In some embodiments, a method of detecting a mutant HECT E3 UPL gene (a mutation in an endogenous HECT E3 UPL gene) is provide, the method comprising detecting in the genome of a plant an endogenous HECT E3 UPL gene encoding a HECT E3 UPL polypeptide comprising a mutation in an active/catalytic site, optionally wherein the active site is in a region of the HECT E3 UPL3 polypeptide comprising: (a) an amino acid sequence having at least 80% identity to any one of SEQ ID NO:88-93 and/or (b) an amino acid sequence having at least 80% sequence identity to a region of consecutive amino acid residues: from residue 1814 to residue 1865, residue 1822 to residue 1857, and/or residue 1829 to residue 1851 with reference to the residue numbering of SEQ ID NO:78, from residue 1820 to residue 1870, residue 1827 to residue 1863, and/or residue 1834 to residue 1856 with reference to the residue numbering of SEQ ID NO:79, from residue 1838 to residue 1888, residue 1845 to residue 1881, and/or residue 1852 to residue 1874 with reference to the residue numbering of SEQ ID NO:80, from residue 1834 to residue 1884, residue 1841 to residue 1877, and/or residue 1848 to residue 1870 with reference to the residue numbering of SEQ ID NO:81, from residue 1783 to residue 1833, residue 1790 to residue 1826, and/or residue 1797 to residue 1818 with reference to the residue numbering of SEQ ID NO:82, or from residue 1776 to residue 1826, residue 1783 to residue 1819, and/or residue 1790 to residue 1812 with reference to the residue numbering of SEQ ID NO:83. In some embodiments, a method of detecting a mutant HECT E3 UPL gene (a mutation in an endogenous HECT E3 UPL gene) is provide, the method comprising detecting in the genome of a plant a nucleic acid encoding the amino acid sequence of SEQ ID NOs:78-83, wherein the amino acid sequence of SEQ ID NOs:78-83 comprises a mutation in one or more amino acid residue(s) located at position 1839 with reference to amino acid position numbering of SEQ ID NO:78, at position 1844 with reference to amino acid position numbering of SEQ ID NO:79, at position 1862 with reference to amino acid position numbering of SEQ ID NO:80, at position 1858 with reference to amino acid position numbering of SEQ ID NO:81, at position 1807 with reference to amino acid position numbering of SEQ ID NO:82, or at position 1800 with reference to amino acid position numbering of SEQ ID NO:83. In some embodiments, the mutation is the result of a nucleotide substitution of a G to a C (G>C). In some embodiments, a mutated HECT E3 UPL peptide comprises at least one mutation comprising a substitution of C for a S.

[0219] In some embodiments, a method of detecting a mutant HECT E3 UPL gene (a mutation in an endogenous HECT E3 UPL gene; e.g., an endogenous HECT E3 UPL3 gene) is provide, the method comprising detecting in the genome of a plant an HECT E3 UPL gene comprising an in-frame or out-of-frame INDEL optionally wherein an out-of-frame INDEL results in a premature stop codon. In some embodiments, the method of detecting a mutant HECT E3 UPL gene comprises detecting a nucleotide sequence having at least 90% sequence identity to any one of SEQ ID NOs:119-125.

[0220] In some embodiments, the present invention provides a method of producing a plant comprising a mutation in an endogenous HECT E3 UPL gene (e.g., HECT E3 UPL3 gene, e.g., HECT E3 UPL3a, HECT E3 UPL3b, HECT E3 UPL3c, HECT E3 UPL3d) and at least one polynucleotide of interest, the method comprising crossing a plant of the invention comprising at least one mutation in an endogenous HECT E3 UPL gene (a first plant) with a second plant that comprises the at least one polynucleotide of interest to produce progeny plants; and selecting progeny plants comprising at least one mutation in the HECT E3 UPL gene and the at least one polynucleotide of interest, thereby producing the plant comprising a mutation in an endogenous HECT E3 UPL gene and at least one polynucleotide of interest.

[0221] The present invention further provides a method of producing a plant comprising a mutation in an endogenous HECT E3 UPL gene and at least one polynucleotide of interest, the method comprising introducing at least one polynucleotide of interest into a plant of the present invention comprising at least one mutation in a HECT E3 UPL gene, thereby producing a plant comprising at least one mutation in a HECT E3 UPL gene and at least one polynucleotide of interest. In some embodiments, the plant is a corn plant. In some embodiments, the plant is a soybean plant.

[0222] A polynucleotide of interest may be any polynucleotide that can confer a desirable phenotype or otherwise modify the phenotype or genotype of a plant. In some embodiments, a polynucleotide of interest may be polynucleotide that confers herbicide tolerance, insect resistance, nematode resistance, disease resistance, increased yield, increased nutrient use efficiency or abiotic stress resistance.

[0223] A HECT E3 UPL gene useful with this invention includes any HECT E3 UPL gene in which a mutation as described herein can confer improvement in one or more yield traits in a plant or part thereof comprising the mutation. In some embodiments, a HECT E3 UPL gene useful with this invention encodes a HECT E3 UPL3 polypeptide, optionally a HECT E3 UPL3a polypeptide, a HECT E3 UPL3b polypeptide, a HECT E3 UPL3c polypeptide, and/or a HECT E3 UPL3d polypeptide. In some embodiments, an endogenous HECT E3 UPL polypeptide comprises an amino acid sequence a sequence having at least 80% sequence identity to any one of SEQ ID NOs:78-83, comprises a region having at least 80% sequence identity to an amino acid sequence of any one of SEQ ID NOs:84-92, and/or comprises a region having at least 90% identity to the amino acid sequence of SEQ ID NO:93.

[0224] In some embodiments, the at least one non-natural mutation in an endogenous HECT E3 UPL gene in a plant may be a base substitution, a base deletion and/or a base insertion or an inversion. In some embodiments, the at least one non-natural mutation in an endogenous HECT E3 UPL gene in a plant may be a substitution, a deletion, an insertion and/or an inversion that results in a null mutation, a dominant negative mutation, a semi-dominant mutation, a hypermorphic mutation, a hypomorphic mutation or a weak loss-of-function mutation, optionally a null mutation or a dominant negative mutation, and a plant having the phenotype of one or more improved yield traits as compared to a control plant devoid of the edit/mutation, optionally wherein the improved yield trait can include but is not limited to, increased seed size (e.g., seed area and/or seed weight) and/or increased seed oil content. For example, the mutation may be a substitution, a deletion and/or an insertion of one or more amino acid residues (e.g., 1, 2, 3, 4, 5, 6, 7, 8, 9 or 10 amino acids of the HECT E3 UPL3 polypeptide) or the mutation may be a base substitution, a base deletion and/or a base insertion of at least 1 nucleotide to about 15 nucleotides (e.g., about 1, 2, 3, 4, 5, 6, 7, 8, 9, 10, 11, 12, 13, 14, or 15 nucleotides, or any range or value therein) in the gene encoding the HECT E3 UPL3 polypeptide or may be a DNA inversion of at least 10 consecutive nucleotides to about 2000 consecutive nucleotides (e.g., about 10, 15, 20, 25, 30, 35, 40, 45, 50, 55, 60, 65, 70, 75, 80, 85, 90, 95, 100, 110, 120, 130, 140, 150, 160, 170, 180, 190, 200, 210, 220, 230, 240, 250, 260, 270, 280, 290, 300, 350, 400, 450, 500, 550, 600, 650, 700, 750, 800, 850, 900, 950, 1000, 1100, 1110, 1120, 1130, 1140, 1150, 1160, 1170, 1180, 1190, 1200, 1210, 1220, 1230, 1240, 1250, 1260, 1270, 1280, 1290, 1300, 1350, 1400, 1450, 1500, 1550, 1600, 1650, 1700, 1750, 1800, 1850, 1900, 1950, or 2000 or more consecutive nucleotides, or any range or value therein). In some embodiments, the at least one non-natural mutation may be a base substitution to an A, a T, a G, or a C. In some embodiments, the at least one non-natural mutation may be, for example, a base substitution to from a G to a C (G>C). A mutation may be a point mutation. In some embodiments, the mutation results in a substituted amino acid residue located at position 1839 with reference to amino acid position numbering of SEQ ID NO:78, at position 1844 with reference to amino acid position numbering of SEQ ID NO:79, at position 1862 with reference to amino acid position numbering of SEQ ID NO:80 at position 1858 with reference to amino acid position numbering of SEQ ID NO:81, at position 1807 with reference to amino acid position numbering of SEQ ID NO:82, or at position 1800 with reference to amino acid position numbering of SEQ ID NO:83.

[0225] In some embodiments, a mutation in an endogenous HECT E3 UPL gene may be made following cleavage by an editing system that comprises a nuclease and a nucleic acid binding domain that binds to a target site within a target nucleic acid (e.g., a HECT E3 UPL gene), the target nucleic acid comprising a sequence having at least 80% sequence identity to any one of the nucleotide sequences of SEQ ID NO:72-77, optionally wherein the target site is located in a region of the HECT E3 UPL gene: the region (a) encoding a sequence having at least 80% sequence identity to an amino acid sequence of any one of SEQ ID NOs:84-92, (b) encoding a sequence having at least 80% sequence identity to a region of consecutive amino acid residues: from residue 50 to residue 95, residue 43 to residue 102, residue 36 to residue 109, residue 1814 to residue 1865, residue 1822 to residue 1857, and/or residue 1829 to residue 1851 with reference to the residue numbering of SEQ ID NO:78, from residue 48 to residue 87, residue 41 to residue 94, residue 34 to residue 101, residue 1820 to residue 1870, residue 1827 to residue 1863, and/or residue 1834 to residue 1856 with reference to the residue numbering of SEQ ID NO:79, from residue 139 to residue 194, residue 132 to residue 201, residue 125 to residue 208, residue 1838 to residue 1888, residue 1845 to residue 1881, and/or residue 1852 to residue 1874 with reference to the residue numbering of SEQ ID NO:80, from residue 104 to residue 146, residue 97 to residue 153, residue 90 to residue 160, residue 1834 to residue 1884, residue 1841 to residue 1877, and/or residue 1848 to residue 1870 with reference to the residue numbering of SEQ ID NO:81, from residue 1783 to residue 1833, residue 1790 to residue 1826, and/or residue 1797 to residue 1818 with reference to the residue numbering of SEQ ID NO:82, and/or from residue 1776 to residue 1826, residue 1783 to residue 1819, and/or residue 1790 to residue 1812 with reference to the residue numbering of SEQ ID NO:83; and/or (c) encoding a sequence having at least 90% sequence identity to the amino acid sequence of SEQ ID NO:93

[0226] Further provided are guide nucleic acids (e.g., gRNA, gDNA, crRNA, crDNA) that bind to a target site in a Homologous to E6AP C-Terminus (HECT) E3 Ubiquitin Protein Ligase (UPL) gene, the target site located in a region of the HECT E3 UPL3 gene: the region (a) encoding a sequence having at least 80% sequence identity to an amino acid sequence of any one of SEQ ID NOs:84-92, (b) encoding a sequence having at least 80% sequence identity to a region of consecutive amino acid residues: from residue 50 to residue 95, residue 43 to residue 102, residue 36 to residue 109, residue 1814 to residue 1865, residue 1822 to residue 1857, and/or residue 1829 to residue 1851 with reference to the residue numbering of SEQ ID NO:78, from residue 48 to residue 87, residue 41 to residue 94, residue 34 to residue 101, residue 1820 to residue 1870, residue 1827 to residue 1863, and/or residue 1834 to residue 1856 with reference to the residue numbering of SEQ ID NO:79, from residue 139 to residue 194, residue 132 to residue 201, residue 125 to residue 208, residue 1838 to residue 1888, residue 1845 to residue 1881, and/or residue 1852 to residue 1874 with reference to the residue numbering of SEQ ID NO:80, from residue 104 to residue 146, residue 97 to residue 153, residue 90 to residue 160, residue 1834 to residue 1884, residue 1841 to residue 1877, and/or residue 1848 to residue 1870 with reference to the residue numbering of SEQ ID NO:81, from residue 1783 to residue 1833, residue 1790 to residue 1826, and/or residue 1797 to residue 1818 with reference to the residue numbering of SEQ ID NO:82, and/or from residue 1776 to residue 1826, residue 1783 to residue 1819, and/or residue 1790 to residue 1812 with reference to the residue numbering of SEQ ID NO:83; and/or (c) encoding a sequence having at least 90% sequence identity to the amino acid sequence of SEQ ID NO:93. In some embodiments, a guide nucleic acid comprises a spacer having the nucleotide sequence of any one of SEQ ID NOs:94-118.

[0227] In some embodiments, a corn plant or plant part thereof is provided comprising at least one non-natural mutation in at least one endogenous Homologous to E6AP C-Terminus (HECT) E3 Ubiquitin Protein Ligase (UPL) gene having the gene identification number (gene ID) of Zm00001d014920 and/or Zm00001d004139, optionally wherein the HECT E3 UPL gene having at least one non-natural mutation comprises a nucleotide sequence having at least 90% sequence identity to any one of SEQ ID NOs:122-125.

[0228] In some embodiments, a soybean plant or plant part thereof is provided comprising at least one non-natural mutation in at least one endogenous Homologous to E6AP C-Terminus (HECT) E3 Ubiquitin Protein Ligase (UPL) gene having the gene identification number (gene ID) of Glyma.11G107500, Glyma.12G032500, Glyma.06G003600 and/or Glyma.04G00400, optionally wherein the HECT E3 UPL gene having at least one non-natural mutation comprises a nucleotide sequence having at least 90% sequence identity to any one of SEQ ID NOs:119-121.

[0229] In some embodiments, a guide nucleic acid is provided that binds to a target nucleic acid in a Homologous to E6AP C-Terminus (HECT) E3 Ubiquitin Protein Ligase (UPL) gene having the gene identification number (gene ID) of Zm00001d014920, Zm00001d004139, Glyma.11G107500, Glyma.12G032500, Glyma.06G003600 and/or Glyma.04G004000.

[0230] In some embodiments, a system is provided comprising a guide nucleic acid comprising a spacer (e.g., one or more spacers) having the nucleotide sequence of any one of SEQ ID NOs:94-118, and a CRISPR-Cas effector protein that associates with the guide nucleic acid. In some embodiments, the system may further comprise a tracr nucleic acid that associates with the guide nucleic acid and a CRISPR-Cas effector protein, optionally wherein the tracr nucleic acid and the guide nucleic acid are covalently linked. As used herein, “a CRISPR-Cas effector protein in association with a guide nucleic acid” refers to the complex that is formed between a CRISPR-Cas effector protein and a guide nucleic acid in order to direct the CRISPR-Cas effector protein to a target site in a gene.

[0231] The invention further provides a gene editing system comprising a CRISPR-Cas effector protein in association with a guide nucleic acid and the guide nucleic acid comprises a spacer sequence that binds to a Homologous to E6AP C-Terminus (HECT) E3 Ubiquitin Protein Ligase (UPL) gene, optionally wherein the HECT E3 UPL gene (a) comprises a sequence having at least 80% sequence identity to any one of the nucleotide sequences of SEQ ID NOs:72-77, (b) encodes a sequence having at least 80% sequence identity to an amino acid sequence of any one of SEQ ID NOs:78-83, (c) encodes a region having at least 80% sequence identity to an amino acid sequence of any one of SEQ ID NOs:84-92, and/or (d) encodes a region having at least 90% identity to the amino acid sequence of SEQ ID NO:93. In some embodiments, a spacer sequence of the guide nucleic acid may comprise the nucleotide sequence of any of SEQ ID NOs:94-118. In some embodiments, the gene editing system may further comprise a tracr nucleic acid that associates with the guide nucleic acid and a CRISPR-Cas effector protein, optionally wherein the tracr nucleic acid and the guide nucleic acid are covalently linked.

[0232] The present invention further provides a complex comprising a CRISPR-Cas effector protein comprising a cleavage domain and a guide nucleic acid, wherein the guide nucleic acid binds to a target site in an endogenous Homologous to E6AP C-Terminus (HECT) E3 Ubiquitin Protein Ligase (UPL) gene, wherein the endogenous HECT E3 UPL3 gene: (a) comprises a sequence having at least 80% sequence identity to any one of the nucleotide sequences of SEQ ID NOs:72-77, (b) encodes a sequence having at least 80% sequence identity to an amino acid sequence of any one of SEQ ID NOs:78-83, (c) encodes a region having at least 80% sequence identity to an amino acid sequence of any one of SEQ ID NOs:84-92, and/or (d) encodes a region having at least 90% identity to the amino acid sequence of SEQ ID NO:93, wherein the cleavage domain cleaves a target strand in the HECT E3 UPL3 gene.

[0233] In some embodiments, expression cassettes are provided that comprise (a) a polynucleotide encoding CRISPR-Cas effector protein comprising a cleavage domain and (b) a guide nucleic acid that binds to a target site in an endogenous Homologous to E6AP C-Terminus (HECT) E3 Ubiquitin Protein Ligase (UPL) gene, wherein the guide nucleic acid comprises a spacer sequence that is complementary to and binds to (i) a portion of a sequence having at least 80% sequence identity to any one of the nucleotide sequences of SEQ ID NOs:72-77; (i) a portion of a nucleic acid encoding an amino acid sequence having at least 80% sequence identity to any one of SEQ ID NOs:78-83; (iii) a portion of a nucleic acid encoding an amino acid sequence having at least 80% sequence identity to any one of SEQ ID NOs:84-92; and/or (iv) a portion of a nucleic acid encoding an amino acid sequence having at least 90% sequence identity to SEQ ID NO:93.

[0234] Also provided herein are nucleic acids comprising mutated HECT E3 UPL genes that when present in a plant or plant part results in the plant comprising a phenotype of one or more improved yield traits as compared to a plant or plant part not devoid of the mutation, wherein an improved yield trait can include, but is not limited to, increased seed size and/or increased seed oil content, optionally wherein the mutation is a dominant negative mutation or a null mutation, optionally wherein a mutated HECT E3 UPL gene may comprise at least at least 90% sequence identity to any one of SEQ ID NOs:119-125.

[0235] Nucleic acid constructs of the invention (e.g., a construct comprising a sequence specific nucleic acid binding domain (e.g., sequence specific DNA binding domain), a CRISPR-Cas effector domain, a deaminase domain, reverse transcriptase (RT), RT template and/or a guide nucleic acid, etc.) and expression cassettes/vectors comprising the same may be used as an editing system of this invention for modifying target nucleic acids (e.g., endogenous HECT E3 UPL genes) and/or their expression.

[0236] Any plant comprising an endogenous HECT E3 UPL gene (e.g., a HECT E3 UPL3 gene, e.g., a HECT E3 UPL3a gene, a HECT E3 UPL3b gene, a HECT E3 UPL3c gene, a HECT E3 UPL3d gene) that is capable of conferring at least one improved yield trait when modified as described herein may be modified (e.g., mutated, e.g., base edited, cleaved, nicked, etc.) as described herein (e.g., using the polypeptides, polynucleotides, RNPs, nucleic acid constructs, expression cassettes, and/or vectors of the invention) to improve one or more yield traits in the plant. A plant exhibiting an improved yield trait may show an improvement of about 5% to about 100% (e.g., about 5, 6, 7, 8, 9, 10, 11, 12, 13, 14, 15, 16, 17, 18, 19, 20, 21, 22, 23, 24, 25, 26, 27, 28, 29, 30, 31, 32, 33, 34, 35, 36, 37, 38, 39, 40, 41, 42, 43, 44, 45, 46, 47, 48, 49, 50, 51, 52, 53, 54, 55, 56, 57, 58, 59, 60, 61, 62, 63, 64, 65, 66, 67, 68, 69, 70, 71, 72, 73, 74, 75, 76, 77, 78, 79, 80, 81, 82, 83, 84, 85, 86, 87, 88, 89, 90, 91, 92, 93, 94, 95, 96, 97, 98, 99, or 100% or more or any range or value therein; e.g., about 5% to about 10%, about 5% to about 15%, about 5% to about 20%, about 10% to about 50%, about 10% to about 80%, about 10% to about 90%, about 10% to about 100%, about 20% to about 50%, about 20% to about 80%, about 20% to about 90%, about 20% to about 100%, about 30% to about 50%, about 30% to about 80%, about 30% to about 90%, about 30% to about 100%, about 50% to about 100%, about 75% to about 100% or more, and any range or value therein) in the yield trait as compared to a plant or part thereof that is devoid of the mutated endogenous HECT E3 UPL gene.

[0237] An editing system useful with this invention can be any site-specific (sequence-specific) genome editing system now known or later developed, which system can introduce mutations in target specific manner. For example, an editing system (e.g., site- or sequence-specific editing system) can include, but is not limited to, a CRISPR-Cas editing system, a meganuclease editing system, a zinc finger nuclease (ZFN) editing system, a transcription activator-like effector nuclease (TALEN) editing system, a base editing system and/or a prime editing system, each of which can comprise one or more polypeptides and/or one or more polynucleotides that when expressed as a system in a cell can modify (mutate) a target nucleic acid in a sequence specific manner. In some embodiments, an editing system (e.g., site- or sequence-specific editing system) can comprise one or more polynucleotides and/or one or more polypeptides, including but not limited to a nucleic acid binding domain (DNA binding domain), a nuclease, and/or other polypeptide, and/or a polynucleotide.

[0238] In some embodiments, an editing system can comprise one or more sequence-specific nucleic acid binding domains (DNA binding domains) that can be from, for example, a polynucleotide-guided endonuclease, a CRISPR-Cas endonuclease (e.g., CRISPR-Cas effector protein), a zinc finger nuclease, a transcription activator-like effector nuclease (TALEN) and/or an Argonaute protein. In some embodiments, an editing system can comprise one or more cleavage domains (e.g., nucleases) including, but not limited to, an endonuclease (e.g., Fok1), a polynucleotide-guided endonuclease, a CRISPR-Cas endonuclease (e.g., CRISPR-Cas effector protein), a zinc finger nuclease, and/or a transcription activator-like effector nuclease (TALEN). In some embodiments, an editing system can comprise one or more polypeptides that include, but are not limited to, a deaminase (e.g., a cytosine deaminase, an adenine deaminase), a reverse transcriptase, a Dna2 polypeptide, and/or a 5′ flap endonuclease (FEN). In some embodiments, an editing system can comprise one or more polynucleotides, including, but is not limited to, a CRISPR array (CRISPR guide) nucleic acid, extended guide nucleic acid, and/or a reverse transcriptase template.

[0239] In some embodiments, a method of modifying or editing a Homologous to E6AP C-Terminus (HECT) E3 Ubiquitin Protein Ligase (UPL) gene may comprise contacting a target nucleic acid (e.g., a nucleic acid encoding a HECT E3 UPL polypeptide) with a base-editing fusion protein (e.g., a sequence specific DNA binding protein (e.g., a CRISPR-Cas effector protein or domain) fused to a deaminase domain (e.g., an adenine deaminase and/or a cytosine deaminase) and a guide nucleic acid, wherein the guide nucleic acid is capable of guiding/targeting the base editing fusion protein to the target nucleic acid, thereby editing a locus within the target nucleic acid. In some embodiments, a base editing fusion protein and guide nucleic acid may be comprised in one or more expression cassettes. In some embodiments, the target nucleic acid may be contacted with a base editing fusion protein and an expression cassette comprising a guide nucleic acid. In some embodiments, the sequence-specific nucleic acid binding fusion proteins and guides may be provided as ribonucleoproteins (RNPs). In some embodiments, a cell may be contacted with more than one base-editing fusion protein and/or one or more guide nucleic acids that may target one or more target nucleic acids in the cell.

[0240] In some embodiments, a method of modifying or editing a Homologous to E6AP C-Terminus (HECT) E3 Ubiquitin Protein Ligase (UPL) gene may comprise contacting a target nucleic acid (e.g., a nucleic acid encoding a HECT E3 UPL polypeptide; e.g., a HECT E3 UPL3 polypeptide; e.g., HECT E3 UPL3a, HECT E3 UPL3b, HECT E3 UPL3c, HECT E3 UPL3d) with a sequence-specific nucleic acid binding fusion protein (e.g., a sequence-specific DNA binding protein (e.g., a CRISPR-Cas effector protein or domain) fused to a peptide tag, a deaminase fusion protein comprising a deaminase domain (e.g., an adenine deaminase and/or a cytosine deaminase) fused to an affinity polypeptide that is capable of binding to the peptide tag, and a guide nucleic acid, wherein the guide nucleic acid is capable of guiding/targeting the sequence-specific nucleic acid binding fusion protein to the target nucleic acid and the sequence-specific nucleic acid binding fusion protein is capable of recruiting the deaminase fusion protein to the target nucleic acid via the peptide tag-affinity polypeptide interaction, thereby editing a locus within the target nucleic acid. In some embodiments, the sequence-specific nucleic acid binding fusion protein may be fused to the affinity polypeptide that binds the peptide tag and the deaminase may be fuse to the peptide tag, thereby recruiting the deaminase to the sequence-specific nucleic acid binding fusion protein and to the target nucleic acid. In some embodiments, the sequence-specific binding fusion protein, deaminase fusion protein, and guide nucleic acid may be comprised in one or more expression cassettes. In some embodiments, the target nucleic acid may be contacted with a sequence-specific binding fusion protein, deaminase fusion protein, and an expression cassette comprising a guide nucleic acid. In some embodiments, the sequence-specific nucleic acid binding fusion proteins, deaminase fusion proteins and guides may be provided as ribonucleoproteins (RNPs).

[0241] In some embodiments, methods such as prime editing may be used to generate a mutation in an endogenous HECT E3 UPL gene. In prime editing, RNA-dependent DNA polymerase (reverse transcriptase, RT) and reverse transcriptase templates (RT template) are used in combination with sequence specific nucleic acid binding domains that confer the ability to recognize and bind the target in a sequence-specific manner, and which can also cause a nick of the PAM-containing strand within the target. The nucleic acid binding domain may be a CRISPR-Cas effector protein and in this case, the CRISPR array or guide RNA may be an extended guide that comprises an extended portion comprising a primer binding site (PSB) and the edit to be incorporated into the genome (the template). Similar to base editing, prime editing can take advantageous of the various methods of recruiting proteins for use in the editing to the target site, such methods including both non-covalent and covalent interactions between the proteins and nucleic acids used in the selected process of genome editing.

[0242] As used herein, a “CRISPR-Cas effector protein” is a protein or polypeptide or domain thereof that cleaves or cuts a nucleic acid, binds a nucleic acid (e.g., a target nucleic acid and/or a guide nucleic acid), and/or that identifies, recognizes, or binds a guide nucleic acid as defined herein. In some embodiments, a CRISPR-Cas effector protein may be an enzyme (e.g., a nuclease, endonuclease, nickase, etc.) or portion thereof and/or may function as an enzyme. In some embodiments, a CRISPR-Cas effector protein refers to a CRISPR-Cas nuclease polypeptide or domain thereof that comprises nuclease activity or in which the nuclease activity has been reduced or eliminated, and/or comprises nickase activity or in which the nickase has been reduced or eliminated, and/or comprises single stranded DNA cleavage activity (ss DNAse activity) or in which the ss DNAse activity has been reduced or eliminated, and/or comprises self-processing RNAse activity or in which the self-processing RNAse activity has been reduced or eliminated. A CRISPR-Cas effector protein may bind to a target nucleic acid.

[0243] In some embodiments, a sequence-specific nucleic acid binding domain may be a CRISPR-Cas effector protein. In some embodiments, a CRISPR-Cas effector protein may be from a Type I CRISPR-Cas system, a Type II CRISPR-Cas system, a Type III CRISPR-Cas system, a Type IV CRISPR-Cas system, Type V CRISPR-Cas system, or a Type VI CRISPR-Cas system. In some embodiments, a CRISPR-Cas effector protein of the invention may be from a Type II CRISPR-Cas system or a Type V CRISPR-Cas system. In some embodiments, a CRISPR-Cas effector protein may be Type II CRISPR-Cas effector protein, for example, a Cas9 effector protein. In some embodiments, a CRISPR-Cas effector protein may be Type V CRISPR-Cas effector protein, for example, a Cas12 effector protein.

[0244] In some embodiments, a CRISPR-Cas effector protein may include, but is not limited to, a Cas9, C2c1, C2c3, Cas12a (also referred to as Cpf1), Cas12b, Cas12c, Cas12d, Cas12e, Cas13a, Cas13b, Cas13c, Cas13d, Cas1, CaslB, Cas2, Cas3, Cas3′, Cas3″, Cas4, Cas5, Cas6, Cas7, Cas8, Cas9 (also known as Csn1 and Csx12), Cas10, Csy1, Csy2, Csy3, Cse1, Cse2, Csc1, Csc2, Csa5, Csn2, Csm2, Csm3, Csm4, Csm5, Csm6, Cmr1, Cmr3, Cmr4, Cmr5, Cmr6, Csb1, Csb2, Csb3, Csx17, Csx14, Csx10, Csx16, CsaX, Csx3, Csx1, Csx15, Csf1, Csf2, Csf3, Csf4 (dinG), and/or Csf5 nuclease, optionally wherein the CRISPR-Cas effector protein may be a Cas9, Cas12a (Cpf1), Cas12b, Cas12c (C2c3), Cas12d (CasY), Cas12e (CasX), Cas12g, Cas12h, Cas12i, C2c4, C2c5, C2c8, C2c9, C2c10, Cas14a, Cas14b, and/or Cas14c effector protein.

[0245] In some embodiments, a CRISPR-Cas effector protein useful with the invention may comprise a mutation in its nuclease active site (e.g., RuvC, HNH, e.g., RuvC site of a Cas12a nuclease domain; e.g., RuvC site and/or HNH site of a Cas9 nuclease domain). A CRISPR-Cas effector protein having a mutation in its nuclease active site, and therefore, no longer comprising nuclease activity, is commonly referred to as “dead,” e.g., dCas. In some embodiments, a CRISPR-Cas effector protein domain or polypeptide having a mutation in its nuclease active site may have impaired activity or reduced activity as compared to the same CRISPR-Cas effector protein without the mutation, e.g., a nickase, e.g., Cas9 nickase, Cas12a nickase.

[0246] A CRISPR Cas9 effector protein or CRISPR Cas9 effector domain useful with this invention may be any known or later identified Cas9 nuclease. In some embodiments, a CRISPR Cas9 polypeptide can be a Cas9 polypeptide from, for example, Streptococcus spp. (e.g., S. pyogenes, S. thermophilus), Lactobacillus spp., Bifidobacterium spp., Kandleria spp., Leuconostoc spp., Oenococcus spp., Pediococcus spp., Weissella spp., and/or Olsenella spp. Example Cas9 sequences include, but are not limited to, the amino acid sequences of SEQ ID NO:59 and SEQ ID NO:60 or the nucleotide sequences of SEQ ID NOs:61-71.

[0247] In some embodiments, the CRISPR-Cas effector protein may be a Cas9 polypeptide derived from Streptococcus pyogenes and recognizes the PAM sequence motif NGG, NAG, NGA (Mali et al, Science 2013; 339(6121): 823-826). In some embodiments, the CRISPR-Cas effector protein may be a Cas9 polypeptide derived from Streptococcus thermophiles and recognizes the PAM sequence motif NGGNG and/or NNAGAAW (W=A or T) (See, e.g., Horvath et al, Science, 2010; 327(5962): 167-170, and Deveau et al, J Bacteriol 2008; 190(4): 1390-1400). In some embodiments, the CRISPR-Cas effector protein may be a Cas9 polypeptide derived from Streptococcus mutans and recognizes the PAM sequence motif NGG and/or NAAR (R=A or G) (See, e.g., Deveau et al, J BACTERIOL 2008; 190(4): 1390-1400). In some embodiments, the CRISPR-Cas effector protein may be a Cas9 polypeptide derived from Streptococcus aureus and recognizes the PAM sequence motif NNGRR (R=A or G). In some embodiments, the CRISPR-Cas effector protein may be a Cas9 protein derived from S. aureus, which recognizes the PAM sequence motif N GRRT (R=A or G). In some embodiments, the CRISPR-Cas effector protein may be a Cas9 polypeptide derived from S. aureus, which recognizes the PAM sequence motif N GRRV (R=A or G). In some embodiments, the CRISPR-Cas effector protein may be a Cas9 polypeptide that is derived from Neisseria meningitidis and recognizes the PAM sequence motif N GATT or N GCTT (R=A or G, V=A, G or C) (See, e.g., Hou et ah, PNAS 2013, 1-6). In the aforementioned embodiments, N can be any nucleotide residue, e.g., any of A, G, C or T. In some embodiments, the CRISPR-Cas effector protein may be a Cas13a protein derived from Leptotrichia shahii, which recognizes a protospacer flanking sequence (PFS) (or RNA PAM (rPAM)) sequence motif of a single 3′ A, U, or C, which may be located within the target nucleic acid.

[0248] In some embodiments, the CRISPR-Cas effector protein may be derived from Cas12a, which is a Type V Clustered Regularly Interspaced Short Palindromic Repeats (CRISPR)-Cas nuclease see, e.g., SEQ ID NOs:1-20). Cas12a differs in several respects from the more well-known Type II CRISPR Cas9 nuclease. For example, Cas9 recognizes a G-rich protospacer-adjacent motif (PAM) that is 3′ to its guide RNA (gRNA, sgRNA, crRNA, crDNA, CRISPR array) binding site (protospacer, target nucleic acid, target DNA) (3′-NGG), while Cas12a recognizes a T-rich PAM that is located 5′ to the target nucleic acid (5′-TTN, 5′-TTTN. In fact, the orientations in which Cas9 and Cas12a bind their guide RNAs are very nearly reversed in relation to their N and C termini. Furthermore, Cas12a enzymes use a single guide RNA (gRNA, CRISPR array, crRNA) rather than the dual guide RNA (sgRNA (e.g., crRNA and tracrRNA)) found in natural Cas9 systems, and Cas12a processes its own gRNAs. Additionally, Cas12a nuclease activity produces staggered DNA double stranded breaks instead of blunt ends produced by Cas9 nuclease activity, and Cas12a relies on a single RuvC domain to cleave both DNA strands, whereas Cas9 utilizes an HNH domain and a RuvC domain for cleavage.

[0249] A CRISPR Cas12a effector protein/domain useful with this invention may be any known or later identified Cas12a polypeptide (previously known as Cpf1) (see, e.g., U.S. Pat. No. 9,790,490, which is incorporated by reference for its disclosures of Cpf1 (Cas12a) sequences). The term “Cas12a”, “Cas12a polypeptide” or “Cas12a domain” refers to an RNA-guided nuclease comprising a Cas12a polypeptide, or a fragment thereof, which comprises the guide nucleic acid binding domain of Cas12a and/or an active, inactive, or partially active DNA cleavage domain of Cas12a. In some embodiments, a Cas12a useful with the invention may comprise a mutation in the nuclease active site (e.g., RuvC site of the Cas12a domain). A Cas12a domain or Cas12a polypeptide having a mutation in its nuclease active site, and therefore, no longer comprising nuclease activity, is commonly referred to as deadCas12a (e.g., dCas12a). In some embodiments, a Cas12a domain or Cas12a polypeptide having a mutation in its nuclease active site may have impaired activity, e.g., may have nickase activity.

[0250] Any deaminase domain/polypeptide useful for base editing may be used with this invention. In some embodiments, the deaminase domain may be a cytosine deaminase domain or an adenine deaminase domain. A cytosine deaminase (or cytidine deaminase) useful with this invention may be any known or later identified cytosine deaminase from any organism (see, e.g., U.S. Pat. No. 10,167,457 and Thuronyi et al. Nat. Biotechnol. 37:1070-1079 (2019), each of which is incorporated by reference herein for its disclosure of cytosine deaminases). Cytosine deaminases can catalyze the hydrolytic deamination of cytidine or deoxycytidine to uridine or deoxyuridine, respectively. Thus, in some embodiments, a deaminase or deaminase domain useful with this invention may be a cytidine deaminase domain, catalyzing the hydrolytic deamination of cytosine to uracil. In some embodiments, a cytosine deaminase may be a variant of a naturally occurring cytosine deaminase, including but not limited to a primate (e.g., a human, monkey, chimpanzee, gorilla), a dog, a cow, a rat or a mouse. Thus, in some embodiments, an cytosine deaminase useful with the invention may be about 70% to about 100% identical to a wild type cytosine deaminase (e.g., about 70%, 71%, 72%, 73%, 74%, 75%, 76%, 77%, 78%, 79%, 80%, 81%, 82%, 83%, 84%, 85%, 86%, 87%, 88%, 89%, 90%, 91%, 92%, 93%, 94%, 95%, 96%, 97%, 98%, 99%, or 100% identical, and any range or value therein, to a naturally occurring cytosine deaminase).

[0251] In some embodiments, a cytosine deaminase useful with the invention may be an apolipoprotein B mRNA-editing complex (APOBEC) family deaminase. In some embodiments, the cytosine deaminase may be an APOBEC1 deaminase, an APOBEC2 deaminase, an APOBEC3A deaminase, an APOBEC3B deaminase, an APOBEC3C deaminase, an APOBEC3D deaminase, an APOBEC3F deaminase, an APOBEC3G deaminase, an APOBEC3H deaminase, an APOBEC4 deaminase, a human activation induced deaminase (hAID), an rAPOBEC1, FERNY, and/or a CDA1, optionally a pmCDA1, an atCDA1 (e.g., At2g19570), and evolved versions of the same (e.g., SEQ ID NO:27, SEQ ID NO:28 or SEQ ID NO:29). In some embodiments, the cytosine deaminase may be an APOBEC1 deaminase having the amino acid sequence of SEQ ID NO:23. In some embodiments, the cytosine deaminase may be an APOBEC3A deaminase having the amino acid sequence of SEQ ID NO:24. In some embodiments, the cytosine deaminase may be an CDA1 deaminase, optionally a CDA1 having the amino acid sequence of SEQ ID NO:25. In some embodiments, the cytosine deaminase may be a FERNY deaminase, optionally a FERNY having the amino acid sequence of SEQ ID NO:26. In some embodiments, a cytosine deaminase useful with the invention may be about 70% to about 100% identical (e.g., 70%, 71%, 72%, 73%, 74%, 75%, 76%, 77%, 78%, 79%, 80%, 81%, 82%, 83%, 84%, 85%, 86%, 87%, 88%, 89%, 90%, 91%, 92%, 93%, 94%, 95%, 96%, 97%, 98%, 99%, 99.5% or 100% identical) to the amino acid sequence of a naturally occurring cytosine deaminase (e.g., an evolved deaminase). In some embodiments, a cytosine deaminase useful with the invention may be about 70% to about 99.5% identical (e.g., about 70%, 71%, 72%, 73%, 74%, 75%, 76%, 77%, 78%, 79%, 80%, 81%, 82%, 83%, 84%, 85%, 86%, 87%, 88%, 89%, 90%, 91%, 92%, 93%, 94%, 95%, 96%, 97%, 98%, 99%, or 99.5% identical) to the amino acid sequence of SEQ ID NO:23, SEQ ID NO:24, SEQ ID NO:25 or SEQ ID NO:26 (e.g., at least 80%, at least 85%, at least 90%, at least 92%, at least 95%, at least 96%, at least 97%, at least 98%, at least 99%, or at least 99.5% identical to the amino acid sequence of SEQ ID NO:23, SEQ ID NO:24, SEQ ID NO:25, SEQ ID NO:26, SEQ ID NO:27, SEQ ID NO:28 or SEQ ID NO:29). In some embodiments, a polynucleotide encoding a cytosine deaminase may be codon optimized for expression in a plant and the codon optimized polypeptide may be about 70% to 99.5% identical to the reference polynucleotide.

[0252] In some embodiments, a nucleic acid construct of this invention may further encode a uracil glycosylase inhibitor (UGI) (e.g., uracil-DNA glycosylase inhibitor) polypeptide/domain. Thus, in some embodiments, a nucleic acid construct encoding a CRISPR-Cas effector protein and a cytosine deaminase domain (e.g., encoding a fusion protein comprising a CRISPR-Cas effector protein domain fused to a cytosine deaminase domain, and/or a CRISPR-Cas effector protein domain fused to a peptide tag or to an affinity polypeptide capable of binding a peptide tag and/or a deaminase protein domain fused to a peptide tag or to an affinity polypeptide capable of binding a peptide tag) may further encode a uracil-DNA glycosylase inhibitor (UGI), optionally wherein the UGI may be codon optimized for expression in a plant. In some embodiments, the invention provides fusion proteins comprising a CRISPR-Cas effector polypeptide, a deaminase domain, and a UGI and/or one or more polynucleotides encoding the same, optionally wherein the one or more polynucleotides may be codon optimized for expression in a plant. In some embodiments, the invention provides fusion proteins, wherein a CRISPR-Cas effector polypeptide, a deaminase domain, and a UGI may be fused to any combination of peptide tags and affinity polypeptides as described herein, thereby recruiting the deaminase domain and UGI to the CRISPR-Cas effector polypeptide and a target nucleic acid. In some embodiments, a guide nucleic acid may be linked to a recruiting RNA motif and one or more of the deaminase domain and/or UGI may be fused to an affinity polypeptide that is capable of interacting with the recruiting RNA motif, thereby recruiting the deaminase domain and UGI to a target nucleic acid.

[0253] A “uracil glycosylase inhibitor” useful with the invention may be any protein that is capable of inhibiting a uracil-DNA glycosylase base-excision repair enzyme. In some embodiments, a UGI domain comprises a wild type UGI or a fragment thereof. In some embodiments, a UGI domain useful with the invention may be about 70% to about 100% identical (e.g., 70%, 71%, 72%, 73%, 74%, 75%, 76%, 77%, 78%, 79%, 80%, 81%, 82%, 83%, 84%, 85%, 86%, 87%, 88%, 89%, 90%, 91%, 92%, 93%, 94%, 95%, 96%, 97%, 98%, 99%, 99.5% or 100% identical and any range or value therein) to the amino acid sequence of a naturally occurring UGI domain. In some embodiments, a UGI domain may comprise the amino acid sequence of SEQ ID NO:41 or a polypeptide having about 70% to about 99.5% sequence identity to the amino acid sequence of SEQ ID NO:41 (e.g., at least 80%, at least 85%, at least 90%, at least 92%, at least 95%, at least 96%, at least 97%, at least 98%, at least 99%, or at least 99.5% identical to the amino acid sequence of SEQ ID NO:41). For example, in some embodiments, a UGI domain may comprise a fragment of the amino acid sequence of SEQ ID NO:41 that is 100% identical to a portion of consecutive nucleotides (e.g., 10, 15, 20, 25, 30, 35, 40, 45, 50, 55, 60, 65, 70, 75, 80 consecutive nucleotides; e.g., about 10, 15, 20, 25, 30, 35, 40, 45, to about 50, 55, 60, 65, 70, 75, 80 consecutive nucleotides) of the amino acid sequence of SEQ ID NO:41. In some embodiments, a UGI domain may be a variant of a known UGI (e.g., SEQ ID NO:41) having about 70% to about 99.5% sequence identity (e.g., 70%, 71%, 72%, 73%, 74%, 75%, 76%, 77%, 78%, 79%, 80%, 81%, 82%, 83%, 84%, 85%, 86%, 87%, 88%, 89%, 90%, 91%, 92%, 93%, 94%, 95%, 96%, 97%, 98%, 99%, 99.5% sequence identity, and any range or value therein) to the known UGI. In some embodiments, a polynucleotide encoding a UGI may be codon optimized for expression in a plant (e.g., a plant) and the codon optimized polypeptide may be about 70% to about 99.5% identical to the reference polynucleotide.

[0254] An adenine deaminase (or adenosine deaminase) useful with this invention may be any known or later identified adenine deaminase from any organism (see, e.g., U.S. Pat. No. 10,113,163, which is incorporated by reference herein for its disclosure of adenine deaminases).

[0255] An adenine deaminase can catalyze the hydrolytic deamination of adenine or adenosine. In some embodiments, the adenine deaminase may catalyze the hydrolytic deamination of adenosine or deoxyadenosine to inosine or deoxyinosine, respectively. In some embodiments, the adenosine deaminase may catalyze the hydrolytic deamination of adenine or adenosine in DNA. In some embodiments, an adenine deaminase encoded by a nucleic acid construct of the invention may generate an A→G conversion in the sense (e.g., “+”; template) strand of the target nucleic acid or a T→C conversion in the antisense (e.g., “−”, complementary) strand of the target nucleic acid.

[0256] In some embodiments, an adenosine deaminase may be a variant of a naturally occurring adenine deaminase. Thus, in some embodiments, an adenosine deaminase may be about 70% to 100% identical to a wild type adenine deaminase (e.g., about 70%, 71%, 72%, 73%, 74%, 75%, 76%, 77%, 78%, 79%, 80%, 81%, 82%, 83%, 84%, 85%, 86%, 87%, 88%, 89%, 90%, 91%, 92%, 93%, 94%, 95%, 96%, 97%, 98%, 99%, or 100% identical, and any range or value therein, to a naturally occurring adenine deaminase). In some embodiments, the deaminase or deaminase does not occur in nature and may be referred to as an engineered, mutated or evolved adenosine deaminase. Thus, for example, an engineered, mutated or evolved adenine deaminase polypeptide or an adenine deaminase domain may be about 70% to 99.9% identical to a naturally occurring adenine deaminase polypeptide/domain (e.g., about 70%, 71%, 72%, 73%, 74%, 75%, 76%, 77%, 78%, 79%, 80%, 81%, 82%, 83%, 84%, 85%, 86%, 87%, 88%, 89%, 90%, 91%, 92%, 93%, 94%, 95%, 96%, 97%, 98%, 99%, 99.1%, 99.2%, 99.3%, 99.4%, 99.5%, 99.6%, 99.7%, 99.8% or 99.9% identical, and any range or value therein, to a naturally occurring adenine deaminase polypeptide or adenine deaminase domain). In some embodiments, the adenosine deaminase may be from a bacterium, (e.g., Escherichia coli, Staphylococcus aureus, Haemophilus influenzae, Caulobacter crescentus, and the like). In some embodiments, a polynucleotide encoding an adenine deaminase polypeptide/domain may be codon optimized for expression in a plant.

[0257] In some embodiments, an adenine deaminase domain may be a wild type tRNA-specific adenosine deaminase domain, e.g., a tRNA-specific adenosine deaminase (TadA) and/or a mutated/evolved adenosine deaminase domain, e.g., mutated/evolved tRNA-specific adenosine deaminase domain (TadA*). In some embodiments, a TadA domain may be from E. coli. In some embodiments, the TadA may be modified, e.g., truncated, missing one or more N-terminal and/or C-terminal amino acids relative to a full-length TadA (e.g., 1, 2, 3, 4, 5, 6, 7, 8, 9, 10, 11, 12, 13, 14, 15, 6, 17, 18, 19, or 20 N-terminal and/or C terminal amino acid residues may be missing relative to a full length TadA. In some embodiments, a TadA polypeptide or TadA domain does not comprise an N-terminal methionine. In some embodiments, a wild type E. coli TadA comprises the amino acid sequence of SEQ ID NO:30. In some embodiments, a mutated/evolved E. coli TadA* comprises the amino acid sequence of SEQ ID NOs:31-40 (e.g., SEQ ID NOs: 31, 32, 33, 34, 35, 36, 37, 38, 39 or 40). In some embodiments, a polynucleotide encoding a TadA/TadA* may be codon optimized for expression in a plant.

[0258] A cytosine deaminase catalyzes cytosine deamination and results in a thymidine (through a uracil intermediate), causing a C to T conversion, or a G to A conversion in the complementary strand in the genome. Thus, in some embodiments, the cytosine deaminase encoded by the polynucleotide of the invention generates a C→T conversion in the sense (e.g., “+”; template) strand of the target nucleic acid or a G→A conversion in antisense (e.g., “−”, complementary) strand of the target nucleic acid.

[0259] In some embodiments, the adenine deaminase encoded by the nucleic acid construct of the invention generates an A→G conversion in the sense (e.g., “+”; template) strand of the target nucleic acid or a T→C conversion in the antisense (e.g., “−”, complementary) strand of the target nucleic acid.

[0260] The nucleic acid constructs of the invention encoding a base editor comprising a sequence-specific nucleic acid binding protein and a cytosine deaminase polypeptide, and nucleic acid constructs/expression cassettes/vectors encoding the same, may be used in combination with guide nucleic acids for modifying target nucleic acid including, but not limited to, generation of C→T or G→A mutations in a target nucleic acid including, but not limited to, a plasmid sequence; generation of C→T or G→A mutations in a coding sequence to alter an amino acid identity; generation of C→T or G→A mutations in a coding sequence to generate a stop codon; generation of C→T or G→A mutations in a coding sequence to disrupt a start codon; generation of point mutations in genomic DNA to disrupt function; and/or generation of point mutations in genomic DNA to disrupt splice junctions.

[0261] The nucleic acid constructs of the invention encoding a base editor comprising a sequence-specific nucleic acid binding protein and an adenine deaminase polypeptide, and expression cassettes and/or vectors encoding the same may be used in combination with guide nucleic acids for modifying a target nucleic acid including, but not limited to, generation of A→G or T→C mutations in a target nucleic acid including, but not limited to, a plasmid sequence; generation of A→G or T→C mutations in a coding sequence to alter an amino acid identity; generation of A→G or T→C mutations in a coding sequence to generate a stop codon; generation of A→G or T→C mutations in a coding sequence to disrupt a start codon; generation of point mutations in genomic DNA to disrupt function; and/or generation of point mutations in genomic DNA to disrupt splice junctions.

[0262] The nucleic acid constructs of the invention comprising a CRISPR-Cas effector protein or a fusion protein thereof may be used in combination with a guide RNA (gRNA, CRISPR array, CRISPR RNA, crRNA), designed to function with the encoded CRISPR-Cas effector protein or domain, to modify a target nucleic acid. A guide nucleic acid useful with this invention comprises at least one spacer sequence and at least one repeat sequence. The guide nucleic acid is capable of forming a complex with the CRISPR-Cas nuclease domain encoded and expressed by a nucleic acid construct of the invention and the spacer sequence is capable of hybridizing to a target nucleic acid, thereby guiding the complex (e.g., a CRISPR-Cas effector fusion protein (e.g., CRISPR-Cas effector domain fused to a deaminase domain and/or a CRISPR-Cas effector domain fused to a peptide tag or an affinity polypeptide to recruit a deaminase domain and optionally, a UGI) to the target nucleic acid, wherein the target nucleic acid may be modified (e.g., cleaved or edited) or modulated (e.g., modulating transcription) by the deaminase domain.

[0263] As an example, a nucleic acid construct encoding a Cas9 domain linked to a cytosine deaminase domain (e.g., fusion protein) may be used in combination with a Cas9 guide nucleic acid to modify a target nucleic acid, wherein the cytosine deaminase domain of the fusion protein deaminates a cytosine base in the target nucleic acid, thereby editing the target nucleic acid. In a further example, a nucleic acid construct encoding a Cas9 domain linked to an adenine deaminase domain (e.g., fusion protein) may be used in combination with a Cas9 guide nucleic acid to modify a target nucleic acid, wherein the adenine deaminase domain of the fusion protein deaminates an adenosine base in the target nucleic acid, thereby editing the target nucleic acid.

[0264] Likewise, a nucleic acid construct encoding a Cas12a domain (or other selected CRISPR-Cas nuclease, e.g., C2c1, C2c3, Cas12b, Cas12c, Cas12d, Cas12e, Cas13a, Cas13b, Cas13c, Cas13d, Cas1, CaslB, Cas2, Cas3, Cas3′, Cas3″, Cas4, Cas5, Cas6, Cas7, Cas8, Cas9 (also known as Csn1 and Csx12), Cas10, Csy1, Csy2, Csy3, Cse1, Cse2, Csc1, Csc2, Csa5, Csn2, Csm2, Csm3, Csm4, Csm5, Csm6, Cmr1, Cmr3, Cmr4, Cmr5, Cmr6, Csb1, Csb2, Csb3, Csx17, Csx14, Csx10, Csx16, CsaX, Csx3, Csx1, Csx15, Csf1, Csf2, Csf3, Csf4 (dinG), and/or Csf5) linked to a cytosine deaminase domain or adenine deaminase domain (e.g., fusion protein) may be used in combination with a Cas12a guide nucleic acid (or the guide nucleic acid for the other selected CRISPR-Cas nuclease) to modify a target nucleic acid, wherein the cytosine deaminase domain or adenine deaminase domain of the fusion protein deaminates a cytosine base in the target nucleic acid, thereby editing the target nucleic acid.

[0265] A “guide nucleic acid,” “guide RNA,” “gRNA,” “CRISPR RNA/DNA” “crRNA” or “crDNA” as used herein means a nucleic acid that comprises at least one spacer sequence, which is complementary to (and hybridizes to) a target DNA (e.g., protospacer), and at least one repeat sequence (e.g., a repeat of a Type V Cas12a CRISPR-Cas system, or a fragment or portion thereof; a repeat of a Type II Cas9 CRISPR-Cas system, or fragment thereof; a repeat of a Type V C2c1 CRISPR Cas system, or a fragment thereof; a repeat of a CRISPR-Cas system of, for example, C2c3, Cas12a (also referred to as Cpf1), Cas12b, Cas12c, Cas12d, Cas12e, Cas13a, Cas13b, Cas13c, Cas13d, Cas1, CaslB, Cas2, Cas3, Cas3′, Cas3″, Cas4, Cas5, Cas6, Cas7, Cas8, Cas9 (also known as Csn1 and Csx12), Cas10, Csy1, Csy2, Csy3, Cse1, Cse2, Csc1, Csc2, Csa5, Csn2, Csm2, Csm3, Csm4, Csm5, Csm6, Cmr1, Cmr3, Cmr4, Cmr5, Cmr6, Csb1, Csb2, Csb3, Csx17, Csx14, Csx10, Csx16, CsaX, Csx3, Csx1, Csx15, Csf1, Csf2, Csf3, Csf4 (dinG), and/or Csf5, or a fragment thereof), wherein the repeat sequence may be linked to the 5′ end and/or the 3′ end of the spacer sequence. The design of a gRNA of this invention may be based on a Type I, Type II, Type III, Type IV, Type V, or Type VI CRISPR-Cas system.

[0266] In some embodiments, a Cas12a gRNA may comprise, from 5′ to 3′, a repeat sequence (full length or portion thereof (“handle”); e.g., pseudoknot-like structure) and a spacer sequence.

[0267] In some embodiments, a guide nucleic acid may comprise more than one repeat sequence-spacer sequence (e.g., 2, 3, 4, 5, 6, 7, 8, 9, 10, or more repeat-spacer sequences) (e.g., repeat-spacer-repeat, e.g., repeat-spacer-repeat-spacer-repeat-spacer-repeat-spacer-repeat-spacer, and the like). The guide nucleic acids of this invention are synthetic, human-made and not found in nature. A gRNA can be quite long and may be used as an aptamer (like in the MS2 recruitment strategy) or other RNA structures hanging off the spacer.

[0268] A “repeat sequence” as used herein, refers to, for example, any repeat sequence of a wild-type CRISPR Cas locus (e.g., a Cas9 locus, a Cas12a locus, a C2c1 locus, etc.) or a repeat sequence of a synthetic crRNA that is functional with the CRISPR-Cas effector protein encoded by the nucleic acid constructs of the invention. A repeat sequence useful with this invention can be any known or later identified repeat sequence of a CRISPR-Cas locus (e.g., Type I, Type II, Type III, Type IV, Type V or Type VI) or it can be a synthetic repeat designed to function in a Type I, II, III, IV, V or VI CRISPR-Cas system. A repeat sequence may comprise a hairpin structure and/or a stem loop structure. In some embodiments, a repeat sequence may form a pseudoknot-like structure at its 5′ end (i.e., “handle”). Thus, in some embodiments, a repeat sequence can be identical to or substantially identical to a repeat sequence from wild-type Type I CRISPR-Cas loci, Type II, CRISPR-Cas loci, Type III, CRISPR-Cas loci, Type IV CRISPR-Cas loci, Type V CRISPR-Cas loci and/or Type VI CRISPR-Cas loci. A repeat sequence from a wild-type CRISPR-Cas locus may be determined through established algorithms, such as using the CRISPRfinder offered through CRISPRdb (see, Grissa et al. Nucleic Acids Res. 35(Web Server issue):W52-7). In some embodiments, a repeat sequence or portion thereof is linked at its 3′ end to the 5′ end of a spacer sequence, thereby forming a repeat-spacer sequence (e.g., guide nucleic acid, guide RNA/DNA, crRNA, crDNA).

[0269] In some embodiments, a repeat sequence comprises, consists essentially of, or consists of at least 10 nucleotides depending on the particular repeat and whether the guide nucleic acid comprising the repeat is processed or unprocessed (e.g., about 10, 11, 12, 13, 14, 15, 16, 17, 18, 19, 20, 21, 22, 23, 24, 25, 26, 27, 28, 29, 30, 31, 32, 33, 34, 35, 36, 37, 38, 39, 40, 41, 42, 43, 44, 45, 46, 47, 48, 49, 50 to 100 or more nucleotides, or any range or value therein). In some embodiments, a repeat sequence comprises, consists essentially of, or consists of about 10 to about 20, about 10 to about 30, about 10 to about 45, about 10 to about 50, about 15 to about 30, about 15 to about 40, about 15 to about 45, about 15 to about 50, about 20 to about 30, about 20 to about 40, about 20 to about 50, about 30 to about 40, about 40 to about 80, about 50 to about 100 or more nucleotides.

[0270] A repeat sequence linked to the 5′ end of a spacer sequence can comprise a portion of a repeat sequence (e.g., 5, 6, 7, 8, 9, 10, 11, 12, 13, 14, 15, 16, 17, 18, 19, 20, 21, 22, 23, 24, 25, 26, 27, 28, 29, 30, 31, 32, 33, 34, 35 or more contiguous nucleotides of a wild type repeat sequence). In some embodiments, a portion of a repeat sequence linked to the 5′ end of a spacer sequence can be about five to about ten consecutive nucleotides in length (e.g., about 5, 6, 7, 8, 9, 10 nucleotides) and have at least 90% sequence identity (e.g., at least about 90%, 91%, 92%, 93%, 94%, 95%, 96%, 97%, 98%, 99%, or more (e.g., 99.1, 99.2, 99.3, 99.4, 99.5, 99.6, 99.7, 99.8, 99.9, or 100%)) to the same region (e.g., 5′ end) of a wild type CRISPR Cas repeat nucleotide sequence. In some embodiments, a portion of a repeat sequence may comprise a pseudoknot-like structure at its 5′ end (e.g., “handle”).

[0271] A “spacer sequence” as used herein is a nucleotide sequence that is complementary to a target nucleic acid (e.g., target DNA) (e.g., protospacer) (e.g., a portion of consecutive nucleotides of a sequence that (a) comprises a sequence of consecutive nucleotides having at least 80% sequence identity to any one of SEQ ID NOs:72-77; (b) encodes a sequence of consecutive amino acids having at least 80% sequence identity to any one of SEQ ID NOs:78-83; (c) comprises a region encoding a sequence of consecutive amino acids having at least 80% sequence identity to any one of SEQ ID NOs:84-92; or (d) comprises a region encoding a sequence of consecutive amino acids having at least 90% sequence identity to SEQ ID NOs:93. In some embodiments, a spacer sequence (e.g., one or more spacers) may include, but is not limited to, the nucleotide sequences of any one of SEQ ID NOs:94-118. The spacer sequence can be fully complementary or substantially complementary (e.g., at least about 70% complementary (e.g., about 70%, 71%, 72%, 73%, 74%, 75%, 76%, 77%, 78%, 79%, 80%, 81%, 82%, 83%, 84%, 85%, 86%, 87%, 88%, 89%, 90%, 91%, 92%, 93%, 94%, 95%, 96%, 97%, 98%, 99%, or more (e.g., 99.1, 99.2, 99.3, 99.4, 99.5, 99.6, 99.7, 99.8, 99.9, or 100%)) to a target nucleic acid. Thus, in some embodiments, the spacer sequence can have one, two, three, four, or five mismatches as compared to the target nucleic acid, which mismatches can be contiguous or noncontiguous. In some embodiments, the spacer sequence can have 70% complementarity to a target nucleic acid. In other embodiments, the spacer nucleotide sequence can have 80% complementarity to a target nucleic acid. In still other embodiments, the spacer nucleotide sequence can have 85%, 90%, 95%, 96%, 97%, 98%, 99% or 99.5% complementarity, and the like, to the target nucleic acid (protospacer). In some embodiments, the spacer sequence is 100% complementary to the target nucleic acid. A spacer sequence may have a length from about 15 nucleotides to about 30 nucleotides (e.g., 15, 16, 17, 18, 19, 20, 21, 22, 23, 24, 25, 26, 27, 28, 29, or 30 nucleotides, or any range or value therein). Thus, in some embodiments, a spacer sequence may have complete complementarity or substantial complementarity over a region of a target nucleic acid (e.g., protospacer) that is at least about 15 nucleotides to about 30 nucleotides in length. In some embodiments, the spacer is about 20 nucleotides in length. In some embodiments, the spacer is about 21, 22, or 23 nucleotides in length.

[0272] In some embodiments, the 5′ region of a spacer sequence of a guide nucleic acid may be identical to a target DNA, while the 3′ region of the spacer may be substantially complementary to the target DNA (e.g., Type V CRISPR-Cas), or the 3′ region of a spacer sequence of a guide nucleic acid may be identical to a target DNA, while the 5′ region of the spacer may be substantially complementary to the target DNA (e.g., Type II CRISPR-Cas), and therefore, the overall complementarity of the spacer sequence to the target DNA may be less than 100%. Thus, for example, in a guide for a Type V CRISPR-Cas system, the first 1, 2, 3, 4, 5, 6, 7, 8, 9, 10 nucleotides in the 5′ region (i.e., seed region) of, for example, a 20 nucleotide spacer sequence may be 100% complementary to the target DNA, while the remaining nucleotides in the 3′ region of the spacer sequence are substantially complementary (e.g., at least about 70% complementary) to the target DNA. In some embodiments, the first 1 to 8 nucleotides (e.g., the first 1, 2, 3, 4, 5, 6, 7, 8, nucleotides, and any range therein) of the 5′ end of the spacer sequence may be 100% complementary to the target DNA, while the remaining nucleotides in the 3′ region of the spacer sequence are substantially complementary (e.g., at least about 50% complementary (e.g., 50%, 55%, 60%, 65%, 70%, 71%, 72%, 73%, 74%, 75%, 76%, 77%, 78%, 79%, 80%, 81%, 82%, 83%, 84%, 85%, 86%, 87%, 88%, 89%, 90%, 91%, 92%, 93%, 94%, 95%, 96%, 97%, 98%, 99%, or more)) to the target DNA.

[0273] As a further example, in a guide for a Type II CRISPR-Cas system, the first 1, 2, 3, 4, 5, 6, 7, 8, 9, 10 nucleotides in the 3′ region (i.e., seed region) of, for example, a 20 nucleotide spacer sequence may be 100% complementary to the target DNA, while the remaining nucleotides in the 5′ region of the spacer sequence are substantially complementary (e.g., at least about 70% complementary) to the target DNA. In some embodiments, the first 1 to 10 nucleotides (e.g., the first 1, 2, 3, 4, 5, 6, 7, 8, 9, 10 nucleotides, and any range therein) of the 3′ end of the spacer sequence may be 100% complementary to the target DNA, while the remaining nucleotides in the 5′ region of the spacer sequence are substantially complementary (e.g., at least about 50% complementary (e.g., at least about 50%, 55%, 60%, 65%, 70%, 71%, 72%, 73%, 74%, 75%, 76%, 77%, 78%, 79%, 80%, 81%, 82%, 83%, 84%, 85%, 86%, 87%, 88%, 89%, 90%, 91%, 92%, 93%, 94%, 95%, 96%, 97%, 98%, 99%, or more or any range or value therein)) to the target DNA.

[0274] In some embodiments, a seed region of a spacer may be about 8 to about 10 nucleotides in length, about 5 to about 6 nucleotides in length, or about 6 nucleotides in length.

[0275] As used herein, a “target nucleic acid”, “target DNA,” “target nucleotide sequence,” “target region,” or a “target region in the genome” refers to a region of a plant's genome that is fully complementary (100% complementary) or substantially complementary (e.g., at least 70% complementary (e.g., 70%, 71%, 72%, 73%, 74%, 75%, 76%, 77%, 78%, 79%, 80%, 81%, 82%, 83%, 84%, 85%, 86%, 87%, 88%, 89%, 90%, 91%, 92%, 93%, 94%, 95%, 96%, 97%, 98%, 99%, or more)) to a spacer sequence in a guide nucleic acid of this invention. A target region useful for a CRISPR-Cas system may be located immediately 3′ (e.g., such as for a Type V CRISPR-Cas system) or immediately 5′ (e.g., such as for a Type II CRISPR-Cas system) to a PAM sequence in the genome of the organism (e.g., a plant genome). A target region may be selected from any region of at least 15 consecutive nucleotides (e.g., 16, 17, 18, 19, 20, 21, 22, 23, 24, 25, 26, 27, 28, 29, 30 nucleotides, and the like) located immediately adjacent to a PAM sequence.

[0276] A “protospacer sequence” refers to the target double stranded DNA and specifically to the portion of the target DNA (e.g., or target region in the genome) that is fully or substantially complementary (and hybridizes) to the spacer sequence of the CRISPR repeat-spacer sequences (e.g., guide nucleic acids, CRISPR arrays, crRNAs).

[0277] In the case of Type V CRISPR-Cas (e.g., Cas12a) systems and Type II CRISPR-Cas (Cas9) systems, the protospacer sequence is flanked by (e.g., immediately adjacent to) a protospacer adjacent motif (PAM). For Type IV CRISPR-Cas systems, the PAM is located at the 5′ end on the non-target strand and at the 3′ end of the target strand (see below, as an example).

```
      5′-NNNNNNNNNNNNNNNNNNN-3′ RNA Spacer (SEQ ID NO: 42)
            ||||||||||||||||||||
3′AAANNNNNNNNNNNNNNNNNNN-5′ Taregt strand (SEQ ID NO: 43)
    ||||
5′TTTNNNNNNNNNNNNNNNNNNN-3′ Non-target strand (SEQ ID NO: 44)
```

In the case of Type II CRISPR-Cas (e.g., Cas9) systems, the PAM is located immediately 3′ of the target region. The PAM for Type I CRISPR-Cas systems is located 5′ of the target strand. There is no known PAM for Type III CRISPR-Cas systems. Makarova et al. describes the nomenclature for all the classes, types and subtypes of CRISPR systems (Nature Reviews Microbiology 13:722-736 (2015)). Guide structures and PAMs are described in by R. Barrangou (Genome Biol. 16:247 (2015)).

[0278] Canonical Cas12a PAMs are T rich. In some embodiments, a canonical Cas12a PAM sequence may be 5′-TTN, 5′-TTTN, or 5′-TTTV. In some embodiments, canonical Cas9 (e.g., S. pyogenes) PAMs may be 5′-NGG-3′. In some embodiments, non-canonical PAMs may be used but may be less efficient.

[0279] Additional PAM sequences may be determined by those skilled in the art through established experimental and computational approaches. Thus, for example, experimental approaches include targeting a sequence flanked by all possible nucleotide sequences and identifying sequence members that do not undergo targeting, such as through the transformation of target plasmid DNA (Esvelt et al. 2013. Nat. Methods 10:1116-1121; Jiang et al. 2013. Nat. Biotechnol. 31:233-239). In some aspects, a computational approach can include performing BLAST searches of natural spacers to identify the original target DNA sequences in bacteriophages or plasmids and aligning these sequences to determine conserved sequences adjacent to the target sequence (Briner and Barrangou. 2014. Appl. Environ. Microbiol. 80:994-1001; Mojica et al. 2009. Microbiology 155:733-740).

[0280] In some embodiments, the present invention provides expression cassettes and/or vectors comprising the nucleic acid constructs of the invention (e.g., one or more components of an editing system of the invention). In some embodiments, expression cassettes and/or vectors comprising the nucleic acid constructs of the invention and/or one or more guide nucleic acids may be provided. In some embodiments, a nucleic acid construct of the invention encoding a base editor (e.g., a construct comprising a CRISPR-Cas effector protein and a deaminase domain (e.g., a fusion protein)) or the components for base editing (e.g., a CRISPR-Cas effector protein fused to a peptide tag or an affinity polypeptide, a deaminase domain fused to a peptide tag or an affinity polypeptide, and/or a UGI fused to a peptide tag or an affinity polypeptide), may be comprised on the same or on a separate expression cassette or vector from that comprising the one or more guide nucleic acids. When the nucleic acid construct encoding a base editor or the components for base editing is/are comprised on separate expression cassette(s) or vector(s) from that comprising the guide nucleic acid, a target nucleic acid may be contacted with (e.g., provided with) the expression cassette(s) or vector(s) encoding the base editor or components for base editing in any order from one another and the guide nucleic acid, e.g., prior to, concurrently with, or after the expression cassette comprising the guide nucleic acid is provided (e.g., contacted with the target nucleic acid).

[0281] Fusion proteins of the invention may comprise sequence-specific nucleic acid binding domains (e.g., sequence-specific DNA binding domains), CRISPR-Cas polypeptides, and/or deaminase domains fused to peptide tags or affinity polypeptides that interact with the peptide tags, as known in the art, for use in recruiting the deaminase to the target nucleic acid. Methods of recruiting may also comprise guide nucleic acids linked to RNA recruiting motifs and deaminases fused to affinity polypeptides capable of interacting with RNA recruiting motifs, thereby recruiting the deaminase to the target nucleic acid. Alternatively, chemical interactions may be used to recruit polypeptides (e.g., deaminases) to a target nucleic acid.

[0282] A peptide tag (e.g., epitope) useful with this invention may include, but is not limited to, a GCN4 peptide tag (e.g., Sun-Tag), a c-Myc affinity tag, an HA affinity tag, a His affinity tag, an S affinity tag, a methionine-His affinity tag, an RGD-His of tag, a FLAG octapeptide, a strep tag or strep tag II, a V5 tag, and/or a VSV-G epitope. Any epitope that may be linked to a polypeptide and for which there is a corresponding affinity polypeptide that may be linked to another polypeptide may be used with this invention as a peptide tag. In some embodiments, a peptide tag may comprise 1 or 2 or more copies of a peptide tag (e.g., repeat unit, multimerized epitope (e.g., tandem repeats)) (e.g., 1, 2, 3, 4, 5, 6, 7, 8, 9, 10, 11, 12, 13, 14, 15, 16, 17, 18, 19, 20, 21, 22, 23, 24, 25 or more repeat units. In some embodiments, an affinity polypeptide that interacts with/binds to a peptide tag may be an antibody. In some embodiments, the antibody may be a scFv antibody. In some embodiments, an affinity polypeptide that binds to a peptide tag may be synthetic (e.g., evolved for affinity interaction) including, but not limited to, an affibody, an anticalin, a monobody and/or a DARPin (see, e.g., Sha et al., Protein Sci. 26(5):910-924 (2017)); Gilbreth (Curr Opin Struc Biol 22(4):413-420 (2013)), U.S. Pat. No. 9,982,053, each of which are incorporated by reference in their entireties for the teachings relevant to affibodies, anticalins, monobodies and/or DARPins. Example peptide tag sequences and their affinity polypeptides include, but are not limited to, the amino acid sequences of SEQ ID NOs:45-47.

[0283] In some embodiments, a guide nucleic acid may be linked to an RNA recruiting motif, and a polypeptide to be recruited (e.g., a deaminase) may be fused to an affinity polypeptide that binds to the RNA recruiting motif, wherein the guide binds to the target nucleic acid and the RNA recruiting motif binds to the affinity polypeptide, thereby recruiting the polypeptide to the guide and contacting the target nucleic acid with the polypeptide (e.g., deaminase). In some embodiments, two or more polypeptides may be recruited to a guide nucleic acid, thereby contacting the target nucleic acid with two or more polypeptides (e.g., deaminases). Example RNA recruiting motifs and their affinity polypeptides include, but are not limited to, the sequences of SEQ ID NOs:48-58.

[0284] In some embodiments, a polypeptide fused to an affinity polypeptide may be a reverse transcriptase and the guide nucleic acid may be an extended guide nucleic acid linked to an RNA recruiting motif. In some embodiments, an RNA recruiting motif may be located on the 3′ end of the extended portion of an extended guide nucleic acid (e.g., 5′-3′, repeat-spacer-extended portion (RT template-primer binding site)-RNA recruiting motif). In some embodiments, an RNA recruiting motif may be embedded in the extended portion.

[0285] In some embodiments of the invention, an extended guide RNA and/or guide RNA may be linked to one or to two or more RNA recruiting motifs (e.g., 1, 2, 3, 4, 5, 6, 7, 8, 9, 10 or more motifs; e.g., at least 10 to about 25 motifs), optionally wherein the two or more RNA recruiting motifs may be the same RNA recruiting motif or different RNA recruiting motifs. In some embodiments, an RNA recruiting motif and corresponding affinity polypeptide may include, but is not limited, to a telomerase Ku binding motif (e.g., Ku binding hairpin) and the corresponding affinity polypeptide Ku (e.g., Ku heterodimer), a telomerase Sm7 binding motif and the corresponding affinity polypeptide Sm7, an MS2 phage operator stem-loop and the corresponding affinity polypeptide MS2 Coat Protein (MCP), a PP7 phage operator stem-loop and the corresponding affinity polypeptide PP7 Coat Protein (PCP), an SfMu phage Com stem-loop and the corresponding affinity polypeptide Com RNA binding protein, a PUF binding site (PBS) and the affinity polypeptide Pumilio/fem-3 mRNA binding factor (PUF), and/or a synthetic RNA-aptamer and the aptamer ligand as the corresponding affinity polypeptide. In some embodiments, the RNA recruiting motif and corresponding affinity polypeptide may be an MS2 phage operator stem-loop and the affinity polypeptide MS2 Coat Protein (MCP). In some embodiments, the RNA recruiting motif and corresponding affinity polypeptide may be a PUF binding site (PBS) and the affinity polypeptide Pumilio/fem-3 mRNA binding factor (PUF).

[0286] In some embodiments, the components for recruiting polypeptides and nucleic acids may those that function through chemical interactions that may include, but are not limited to, rapamycin-inducible dimerization of FRB-FKBP; Biotin-streptavidin; SNAP tag; Halo tag; CLIP tag; DmrA-DmrC heterodimer induced by a compound; bifunctional ligand (e.g., fusion of two protein-binding chemicals together, e.g., dihyrofolate reductase (DHFR).

[0287] In some embodiments, the nucleic acid constructs, expression cassettes or vectors of the invention that are optimized for expression in a plant may be about 70% to 100% identical (e.g., about 70%, 71%, 72%, 73%, 74%, 75%, 76%, 77%, 78%, 79%, 80%, 81%, 82%, 83%, 84%, 85%, 86%, 87%, 88%, 89%, 90%, 91%, 92%, 93%, 94%, 95%, 96%, 97%, 98%, 99%, 99.5% or 100%) to the nucleic acid constructs, expression cassettes or vectors comprising the same polynucleotide(s) but which have not been codon optimized for expression in a plant.

[0288] Further provided herein are cells comprising one or more polynucleotides, guide nucleic acids, nucleic acid constructs, expression cassettes or vectors of the invention.

[0289] The nucleic acid constructs of the invention (e.g., a construct comprising a sequence specific DNA binding domain, a CRISPR-Cas effector domain, a deaminase domain, reverse transcriptase (RT), RT template and/or a guide nucleic acid, etc.) and expression cassettes/vectors comprising the same may be used as an editing system of this invention for modifying target nucleic acids and/or their expression.

[0290] A target nucleic acid of any plant or plant part (or groupings of plants, for example, into a genus or higher order classification) may be modified (e.g., mutated, e.g., base edited, cleaved, nicked, etc.) using the polypeptides, polynucleotides, ribonucleoproteins (RNPs), nucleic acid constructs, expression cassettes, and/or vectors of the invention including an angiosperm, a gymnosperm, a monocot, a dicot, a C3, C4, CAM plant, a bryophyte, a fern and/or fern ally, a microalgae, and/or a macroalgae. A plant and/or plant part that may be modified as described herein may be a plant and/or plant part of any plant species/variety/cultivar. In some embodiments, a plant that may be modified as described herein is a monocot. In some embodiments, a plant that may be modified as described herein is a dicot.

[0291] The term “plant part,” as used herein, includes but is not limited to reproductive tissues (e.g., petals, sepals, stamens, pistils, receptacles, anthers, pollen, flowers, fruits, flower bud, ovules, seeds, embryos, nuts, kernels, ears, cobs and husks); vegetative tissues (e.g., petioles, stems, roots, root hairs, root tips, pith, coleoptiles, stalks, shoots, branches, bark, apical meristem, axillary bud, cotyledon, hypocotyls, and leaves); vascular tissues (e.g., phloem and xylem); specialized cells such as epidermal cells, parenchyma cells, collenchyma cells, sclerenchyma cells, stomates, guard cells, cuticle, mesophyll cells; callus tissue; and cuttings. The term “plant part” also includes plant cells, including plant cells that are intact in plants and/or parts of plants, plant protoplasts, plant tissues, plant organs, plant cell tissue cultures, plant calli, plant clumps, and the like. As used herein, “shoot” refers to the above ground parts including the leaves and stems. As used herein, the term “tissue culture” encompasses cultures of tissue, cells, protoplasts and callus.

[0292] As used herein, “plant cell” refers to a structural and physiological unit of the plant, which typically comprise a cell wall but also includes protoplasts. A plant cell of the present invention can be in the form of an isolated single cell or can be a cultured cell or can be a part of a higher-organized unit such as, for example, a plant tissue (including callus) or a plant organ. In some embodiments, a plant cell can be an algal cell. A “protoplast” is an isolated plant cell without a cell wall or with only parts of the cell wall. Thus, in some embodiments of the invention, a transgenic cell comprising a nucleic acid molecule and/or nucleotide sequence of the invention is a cell of any plant or plant part including, but not limited to, a root cell, a leaf cell, a tissue culture cell, a seed cell, a flower cell, a fruit cell, a pollen cell, and the like. In some aspects of the invention, the plant part can be a plant germplasm. In some aspects, a plant cell can be non-propagating plant cell that does not regenerate into a plant.

[0293] “Plant cell culture” means cultures of plant units such as, for example, protoplasts, cell culture cells, cells in plant tissues, pollen, pollen tubes, ovules, embryo sacs, zygotes and embryos at various stages of development.

[0294] As used herein, a “plant organ” is a distinct and visibly structured and differentiated part of a plant such as a root, stem, leaf, flower bud, or embryo.

[0295] “Plant tissue” as used herein means a group of plant cells organized into a structural and functional unit. Any tissue of a plant in planta or in culture is included. This term includes, but is not limited to, whole plants, plant organs, plant seeds, tissue culture and any groups of plant cells organized into structural and/or functional units. The use of this term in conjunction with, or in the absence of, any specific type of plant tissue as listed above or otherwise embraced by this definition is not intended to be exclusive of any other type of plant tissue.

[0296] In some embodiments of the invention, a transgenic tissue culture or transgenic plant cell culture is provided, wherein the transgenic tissue or cell culture comprises a nucleic acid molecule/nucleotide sequence of the invention. In some embodiments, transgenes may be eliminated from a plant developed from the transgenic tissue or cell by breeding of the transgenic plant with a non-transgenic plant and selecting among the progeny for the plants comprising the desired gene edit and not the transgenes used in producing the edit.

[0297] Any plant comprising an endogenous Homologous to E6AP C-Terminus (HECT) E3 Ubiquitin Protein Ligase (UPL) gene (e.g., an endogenous HECT E3 UPL3 gene, e.g., an endogenous HECT E3 UPL3a gene, HECT E3 UPL3b gene, HECT E3 UPL3c gene, HECT E3 UPL3d gene) may be modified as described herein to improve one or more yield traits. Non-limiting examples of plants that may be modified as described herein may include, but are not limited to, turf grasses (e.g., bluegrass, bentgrass, ryegrass, fescue), feather reed grass, tufted hair grass, miscanthus, arundo, switchgrass, vegetable crops, including artichokes, kohlrabi, arugula, leeks, asparagus, lettuce (e.g., head, leaf, romaine), malanga, melons (e.g., muskmelon, watermelon, crenshaw, honeydew, cantaloupe), cole crops (e.g., brussels sprouts, cabbage, cauliflower, broccoli, collards, kale, chinese cabbage, bok choy), cardoni, carrots, napa, okra, onions, celery, parsley, chick peas, parsnips, chicory, peppers, potatoes, cucurbits (e.g., marrow, cucumber, zucchini, squash, pumpkin, honeydew melon, watermelon, cantaloupe), radishes, dry bulb onions, rutabaga, eggplant, salsify, escarole, shallots, endive, garlic, spinach, green onions, squash, greens, beet (sugar beet and fodder beet), sweet potatoes, chard, horseradish, tomatoes, turnips, and spices; a fruit crop such as apples, apricots, cherries, nectarines, peaches, pears, plums, prunes, cherry, quince, fig, nuts (e.g., chestnuts, pecans, pistachios, hazelnuts, pistachios, peanuts, walnuts, macadamia nuts, almonds, and the like), citrus (e.g., clementine, kumquat, orange, grapefruit, tangerine, mandarin, lemon, lime, and the like), blueberries, black raspberries, boysenberries, cranberries, currants, gooseberries, loganberries, raspberries, strawberries, blackberries, grapes (wine and table), avocados, bananas, kiwi, persimmons, pomegranate, pineapple, tropical fruits, pomes, melon, mango, papaya, and lychee, a field crop plant such as clover, alfalfa, timothy, evening primrose, meadow foam, corn/maize (field, sweet, popcorn), hops, jojoba, buckwheat, safflower, quinoa, wheat, rice, barley, rye, millet, sorghum, oats, triticale, sorghum, tobacco, kapok, a leguminous plant (beans (e.g., green and dried), lentils, peas, soybeans), an oil plant (rape, canola, mustard, poppy, olive, sunflower, coconut, castor oil plant, cocoa bean, groundnut, oil palm), duckweed, Arabidopsis, a fiber plant (cotton, flax, hemp, jute), Cannabis (e.g., Cannabis sativa, Cannabis indica, and Cannabis ruderalis), lauraceae (cinnamon, camphor), or a plant such as coffee, sugar cane, tea, and natural rubber plants; and/or a bedding plant such as a flowering plant, a cactus, a succulent and/or an ornamental plant (e.g., roses, tulips, violets), as well as trees such as forest trees (broad-leaved trees and evergreens, such as conifers; e.g., elm, ash, oak, maple, fir, spruce, cedar, pine, birch, cypress, eucalyptus, willow), as well as shrubs and other nursery stock. In some embodiments, the nucleic acid constructs of the invention and/or expression cassettes and/or vectors encoding the same may be used to modify maize, soybean, wheat, canola, rice, tomato, pepper, or sunflower.

[0298] In some embodiments, a plant that may be modified as described herein may include, but is not limited to, corn, soybean, canola, wheat, rice, cotton, sugarcane, sugar beet, barley, oats, alfalfa, sunflower, safflower, oil palm, sesame, coconut, tobacco, potato, sweet potato, cassava, coffee, apple, plum, apricot, peach, cherry, pear, fig, banana, citrus, cocoa, avocado, olive, almond, walnut, strawberry, watermelon, pepper, grape, tomato, cucumber, or a Brassica spp (e.g., B. napus, B. oleracea, B. rapa, B. juncea, and/or B. nigra). In some embodiments, a plant that may be modified as described herein is a dicot. In some embodiments, a plant that may be modified as described herein is a monocot. In some embodiments, a plant that may be modified as described herein is corn (i.e., Zea mays). In some embodiments, a plant that may be modified as described herein is soybean (i.e., Glycine max).

[0299] Thus, plants or plant cultivars which are to be treated with preference in accordance with the invention include all plants which, through genetic modification, received genetic material which imparts particular advantageous useful properties (“traits”) to these plants. Examples of such properties are better plant growth, vigor, stress tolerance, standability, lodging resistance, nutrient uptake, plant nutrition, and/or yield, in particular improved growth, increased tolerance to high or low temperatures, increased tolerance to drought or to levels of water or soil salinity, enhanced flowering performance, easier harvesting, accelerated ripening, higher yields, higher quality and/or a higher nutritional value of the harvested products, better storage life and/or processability of the harvested products.

[0300] Further examples of such properties are an increased resistance against animal and microbial pests, such as against insects, arachnids, nematodes, mites, slugs and snails owing, for example, to toxins formed in the plants. Among DNA sequences encoding proteins which confer properties of tolerance to such animal and microbial pests, in particular insects, mention will particularly be made of the genetic material from Bacillus thuringiensis encoding the Bt proteins widely described in the literature and well known to those skilled in the art. Mention will also be made of proteins extracted from bacteria such as Photorhabdus (WO97/17432 and WO98/08932). In particular, mention will be made of the Bt Cry or VIP proteins which include the CrylA, CryIAb, CryIAc, CryIIA, CryIIIA, CryIIIB2, Cry9c Cry2Ab, Cry3Bb and CryIF proteins or toxic fragments thereof and also hybrids or combinations thereof, especially the CrylF protein or hybrids derived from a CrylF protein (e.g. hybrid CrylA-CrylF proteins or toxic fragments thereof), the CrylA-type proteins or toxic fragments thereof, preferably the CrylAc protein or hybrids derived from the CrylAc protein (e.g. hybrid CrylAb-CrylAc proteins) or the CrylAb or Bt2 protein or toxic fragments thereof, the Cry2Ae, Cry2Af or Cry2Ag proteins or toxic fragments thereof, the CrylA.105 protein or a toxic fragment thereof, the VIP3Aa19 protein, the VIP3Aa20 protein, the VIP3A proteins produced in the COT202 or COT203 cotton events, the VIP3Aa protein or a toxic fragment thereof as described in Estruch et al. (1996), Proc Natl Acad Sci US A. 28; 93(11):5389-94, the Cry proteins as described in WO2001/47952, the insecticidal proteins from Xenorhabdus (as described in WO98/50427), Serratia (particularly from S. entomophila) or Photorhabdus species strains, such as Tc-proteins from Photorhabdus as described in WO98/08932. Also any variants or mutants of any one of these proteins differing in some amino acids (1-10, preferably 1-5) from any of the above named sequences, particularly the sequence of their toxic fragment, or which are fused to a transit peptide, such as a plastid transit peptide, or another protein or peptide, is included herein.

[0301] Another and particularly emphasized example of such properties is conferred tolerance to one or more herbicides, for example imidazolinones, sulphonylureas, glyphosate or phosphinothricin. Among DNA sequences encoding proteins (i.e., polynucleotides of interest) which confer properties of tolerance to certain herbicides on the transformed plant cells and plants, mention will be particularly be made to the bar or PAT gene or the Streptomyces coelicolor gene described in WO2009/152359 which confers tolerance to glufosinate herbicides, a gene encoding a suitable EPSPS (5-Enolpyruvylshikimat-3-phosphat-Synthase) which confers tolerance to herbicides having EPSPS as a target, especially herbicides such as glyphosate and its salts, a gene encoding glyphosate-n-acetyltransferase, or a gene encoding glyphosate oxidoreductase. Further suitable herbicide tolerance traits include at least one ALS (acetolactate synthase) inhibitor (e.g. WO2007/024782), a mutated Arabidopsis ALS/AHAS gene (e.g. U.S. Pat. No. 6,855,533), genes encoding 2,4-D-monooxygenases conferring tolerance to 2,4-D (2,4-dichlorophenoxyacetic acid) and genes encoding Dicamba monooxygenases conferring tolerance to dicamba (3,6-dichloro-2- methoxybenzoic acid).

[0302] Further examples of such properties are increased resistance against phytopathogenic fungi, bacteria and/or viruses owing, for example, to systemic acquired resistance (SAR), systemin, phytoalexins, elicitors and also resistance genes and correspondingly expressed proteins and toxins.

[0303] Particularly useful transgenic events in transgenic plants or plant cultivars which can be treated with preference in accordance with the invention include Event 531/PV-GHBK04 (cotton, insect control, described in WO2002/040677), Event 1143-14A (cotton, insect control, not deposited, described in WO2006/128569); Event 1143-51B (cotton, insect control, not deposited, described in WO2006/128570); Event 1445 (cotton, herbicide tolerance, not deposited, described in US-A 2002-120964 or WO2002/034946); Event 17053 (rice, herbicide tolerance, deposited as PTA-9843, described in WO2010/117737); Event 17314 (rice, herbicide tolerance, deposited as PTA-9844, described in WO2010/117735); Event 281-24-236 (cotton, insect control—herbicide tolerance, deposited as PTA-6233, described in WO2005/103266 or US-A 2005-216969); Event 3006-210-23 (cotton, insect control—herbicide tolerance, deposited as PTA-6233, described in US-A 2007-143876 or WO2005/103266); Event 3272 (corn, quality trait, deposited as PTA-9972, described in WO2006/098952 or US-A 2006-230473); Event 33391 (wheat, herbicide tolerance, deposited as PTA-2347, described in WO2002/027004), Event 40416 (corn, insect control—herbicide tolerance, deposited as ATCC PTA-11508, described in WO 11/075593); Event 43A47 (corn, insect control—herbicide tolerance, deposited as ATCC PTA-11509, described in WO2011/075595); Event 5307 (corn, insect control, deposited as ATCC PTA-9561, described in WO2010/077816); Event ASR-368 (bent grass, herbicide tolerance, deposited as ATCC PTA-4816, described in US-A 2006-162007 or WO2004/053062); Event B16 (corn, herbicide tolerance, not deposited, described in US-A 2003-126634); Event BPS-CV127- 9 (soybean, herbicide tolerance, deposited as NCIMB No. 41603, described in WO2010/080829); Event BLR1 (oilseed rape, restoration of male sterility, deposited as NCIMB 41193, described in WO2005/074671), Event CE43-67B (cotton, insect control, deposited as DSM ACC2724, described in US-A 2009-217423 or WO2006/128573); Event CE44-69D (cotton, insect control, not deposited, described in US-A 2010-0024077); Event CE44-69D (cotton, insect control, not deposited, described in WO2006/128571); Event CE46-02A (cotton, insect control, not deposited, described in WO2006/128572); Event COT102 (cotton, insect control, not deposited, described in US-A 2006-130175 or WO2004/039986); Event COT202 (cotton, insect control, not deposited, described in US-A 2007-067868 or WO2005/054479); Event COT203 (cotton, insect control, not deposited, described in WO2005/054480);); Event DAS21606-3/1606 (soybean, herbicide tolerance, deposited as PTA-11028, described in WO2012/033794), Event DAS40278 (corn, herbicide tolerance, deposited as ATCC PTA-10244, described in WO2011/022469); Event DAS-44406-6/pDAB8264.44.06.1 (soybean, herbicide tolerance, deposited as PTA-11336, described in WO2012/075426), Event DAS-14536-7/pDAB8291.45.36.2 (soybean, herbicide tolerance, deposited as PTA-11335, described in WO2012/075429), Event DAS-59122-7 (corn, insect control—herbicide tolerance, deposited as ATCC PTA 11384, described in US-A 2006-070139); Event DAS-59132 (corn, insect control—herbicide tolerance, not deposited, described in WO2009/100188); Event DAS68416 (soybean, herbicide tolerance, deposited as ATCC PTA-10442, described in WO2011/066384 or WO2011/066360); Event DP-098140-6 (corn, herbicide tolerance, deposited as ATCC PTA-8296, described in US-A 2009-137395 or WO 08/112019); Event DP-305423-1 (soybean, quality trait, not deposited, described in US-A 2008-312082 or WO2008/054747); Event DP-32138-1 (corn, hybridization system, deposited as ATCC PTA-9158, described in US-A 2009-0210970 or WO2009/103049); Event DP-356043-5 (soybean, herbicide tolerance, deposited as ATCC PTA-8287, described in US-A 2010-0184079 or WO2008/002872); Event EE-I (brinjal, insect control, not deposited, described in WO 07/091277); Event Fil 17 (corn, herbicide tolerance, deposited as ATCC 209031, described in US-A 2006-059581 or WO 98/044140); Event FG72 (soybean, herbicide tolerance, deposited as PTA-11041, described in WO2011/063413), Event GA21 (corn, herbicide tolerance, deposited as ATCC 209033, described in US-A 2005-086719 or WO 98/044140); Event GG25 (corn, herbicide tolerance, deposited as ATCC 209032, described in US-A 2005-188434 or WO98/044140); Event GHB119 (cotton, insect control—herbicide tolerance, deposited as ATCC PTA-8398, described in WO2008/151780); Event GHB614 (cotton, herbicide tolerance, deposited as ATCC PTA-6878, described in US-A 2010-050282 or WO2007/017186); Event GJ11 (corn, herbicide tolerance, deposited as ATCC 209030, described in US-A 2005-188434 or WO98/044140); Event GM RZ13 (sugar beet, virus resistance, deposited as NCIMB-41601, described in WO2010/076212); Event H7-1 (sugar beet, herbicide tolerance, deposited as NCIMB 41158 or NCIMB 41159, described in US-A 2004-172669 or WO 2004/074492); Event JOPLIN′ (wheat, disease tolerance, not deposited, described in US-A 2008-064032); Event LL27 (soybean, herbicide tolerance, deposited as NCIMB41658, described in WO2006/108674 or US-A 2008-320616); Event LL55 (soybean, herbicide tolerance, deposited as NCIMB 41660, described in WO 2006/108675 or US-A 2008-196127); Event LLcotton25 (cotton, herbicide tolerance, deposited as ATCC PTA-3343, described in WO2003/013224 or US-A 2003-097687); Event LLRICE06 (rice, herbicide tolerance, deposited as ATCC 203353, described in U.S. Pat. No. 6,468,747 or WO2000/026345); Event LLRice62 (rice, herbicide tolerance, deposited as ATCC 203352, described in WO2000/026345), Event LLRICE601 (rice, herbicide tolerance, deposited as ATCC PTA-2600, described in US-A 2008-2289060 or WO2000/026356); Event LY038 (corn, quality trait, deposited as ATCC PTA-5623, described in US-A 2007-028322 or WO2005/061720); Event MIR162 (corn, insect control, deposited as PTA-8166, described in US-A 2009-300784 or WO2007/142840); Event MIR604 (corn, insect control, not deposited, described in US-A 2008-167456 or WO2005/103301); Event MON15985 (cotton, insect control, deposited as ATCC PTA-2516, described in US-A 2004-250317 or WO2002/100163); Event MON810 (corn, insect control, not deposited, described in US-A 2002-102582); Event MON863 (corn, insect control, deposited as ATCC PTA-2605, described in WO2004/011601 or US-A 2006-095986); Event MON87427 (corn, pollination control, deposited as ATCC PTA-7899, described in WO2011/062904); Event MON87460 (corn, stress tolerance, deposited as ATCC PTA-8910, described in WO2009/111263 or US-A 2011-0138504); Event MON87701 (soybean, insect control, deposited as ATCC PTA-8194, described in US-A 2009-130071 or WO2009/064652); Event MON87705 (soybean, quality trait—herbicide tolerance, deposited as ATCC PTA-9241, described in US-A 2010-0080887 or WO2010/037016); Event MON87708 (soybean, herbicide tolerance, deposited as ATCC PTA-9670, described in WO2011/034704); Event MON87712 (soybean, yield, deposited as PTA-10296, described in WO2012/051199), Event MON87754 (soybean, quality trait, deposited as ATCC PTA-9385, described in WO2010/024976); Event MON87769 (soybean, quality trait, deposited as ATCC PTA-8911, described in US-A 2011-0067141 or WO2009/102873); Event MON88017 (corn, insect control—herbicide tolerance, deposited as ATCC PTA-5582, described in US-A 2008-028482 or WO2005/059103); Event MON88913 (cotton, herbicide tolerance, deposited as ATCC PTA-4854, described in WO2004/072235 or US-A 2006-059590); Event MON88302 (oilseed rape, herbicide tolerance, deposited as PTA-10955, described in WO2011/153186), Event MON88701 (cotton, herbicide tolerance, deposited as PTA-11754, described in WO2012/134808), Event MON89034 (corn, insect control, deposited as ATCC PTA-7455, described in WO 07/140256 or US-A 2008-260932); Event MON89788 (soybean, herbicide tolerance, deposited as ATCC PTA-6708, described in US-A 2006-282915 or WO2006/130436); Event MS1 1 (oilseed rape, pollination control—herbicide tolerance, deposited as ATCC PTA-850 or PTA-2485, described in WO2001/031042); Event MS8 (oilseed rape, pollination control—herbicide tolerance, deposited as ATCC PTA-730, described in WO2001/041558 or US-A 2003-188347); Event NK603 (corn, herbicide tolerance, deposited as ATCC PTA-2478, described in US-A 2007-292854); Event PE-7 (rice, insect control, not deposited, described in WO2008/114282); Event RF3 (oilseed rape, pollination control—herbicide tolerance, deposited as ATCC PTA-730, described in WO2001/041558 or US-A 2003-188347); Event RT73 (oilseed rape, herbicide tolerance, not deposited, described in WO2002/036831 or US-A 2008-070260); Event SYHT0H2/SYN-000H2-5 (soybean, herbicide tolerance, deposited as PTA-11226, described in WO2012/082548), Event T227-1 (sugar beet, herbicide tolerance, not deposited, described in WO2002/44407 or US-A 2009-265817); Event T25 (corn, herbicide tolerance, not deposited, described in US-A 2001-029014 or WO2001/051654); Event T304-40 (cotton, insect control—herbicide tolerance, deposited as ATCC PTA-8171, described in US-A 2010-077501 or WO2008/122406); Event T342-142 (cotton, insect control, not deposited, described in WO2006/128568); Event TC1507 (corn, insect control—herbicide tolerance, not deposited, described in US-A 2005-039226 or WO2004/099447); Event VIP1034 (corn, insect control—herbicide tolerance, deposited as ATCC PTA-3925, described in WO2003/052073), Event 32316 (corn, insect control-herbicide tolerance, deposited as PTA-11507, described in WO2011/084632), Event 4114 (corn, insect control-herbicide tolerance, deposited as PTA-11506, described in WO2011/084621), event EE-GM3/FG72 (soybean, herbicide tolerance, ATCC Accession No. PTA-11041) optionally stacked with event EE-GM1/LL27 or event EE-GM2/LL55 (WO2011/063413A2), event DAS-68416-4 (soybean, herbicide tolerance, ATCC Accession No. PTA-10442, WO2011/066360A1), event DAS-68416-4 (soybean, herbicide tolerance, ATCC Accession No. PTA-10442, WO2011/066384A1), event DP-040416-8 (corn, insect control, ATCC Accession No. PTA-11508, WO2011/075593A1), event DP-043A47-3 (corn, insect control, ATCC Accession N° PTA-11509, WO2011/075595A1), event DP-004114-3 (corn, insect control, ATCC Accession No. PTA-11506, WO2011/084621A1), event DP-032316-8 (corn, insect control, ATCC Accession No. PTA-11507, WO2011/084632A1), event MON-88302-9 (oilseed rape, herbicide tolerance, ATCC Accession No. PTA-10955, WO2011/153186A1), event DAS-21606-3 (soybean, herbicide tolerance, ATCC Accession No. PTA-11028, WO2012/033794A2), event MON-87712-4 (soybean, quality trait, ATCC Accession No. PTA-10296, WO2012/051199A2), event DAS-44406-6 (soybean, stacked herbicide tolerance, ATCC Accession No. PTA-11336, WO2012/075426A1), event DAS-14536-7 (soybean, stacked herbicide tolerance, ATCC Accession No. PTA-11335, WO2012/075429A1), event SYN-000H2-5 (soybean, herbicide tolerance, ATCC Accession No. PTA-11226, WO2012/082548A2), event DP-061061-7 (oilseed rape, herbicide tolerance, no deposit No. available, WO2012071039A1), event DP-073496-4 (oilseed rape, herbicide tolerance, no deposit No. available, US2012131692), event 8264.44.06.1 (soybean, stacked herbicide tolerance, Accession No. PTA-11336, WO2012075426A2), event 8291.45.36.2 (soybean, stacked herbicide tolerance, Accession No. PTA-11335, WO2012075429A2), event SYHT0H2 (soybean, ATCC Accession No. PTA-11226, WO2012/082548A2), event MON88701 (cotton, ATCC Accession No. PTA-11754, WO2012/134808A1), event KK179-2 (alfalfa, ATCC Accession No. PTA-11833, WO2013/003558A1), event pDAB8264.42.32.1 (soybean, stacked herbicide tolerance, ATCC Accession No. PTA-11993, WO2013/010094A1), event MZDT09Y (corn, ATCC Accession N° PTA-13025, WO2013/012775A1).

[0304] The genes/events (e.g., polynucleotides of interest), which impart the desired traits in question, may also be present in combinations with one another in the transgenic plants. Examples of transgenic plants which may be mentioned are the important crop plants, such as cereals (wheat, rice, triticale, barley, rye, oats), maize, soya beans, potatoes, sugar beet, sugar cane, tomatoes, peas and other types of vegetable, cotton, tobacco, oilseed rape and also fruit plants (with the fruits apples, pears, citrus fruits and grapes), with particular emphasis being given to maize, soya beans, wheat, rice, potatoes, cotton, sugar cane, tobacco and oilseed rape. Traits which are particularly emphasized are the increased resistance of the plants to insects, arachnids, nematodes and slugs and snails, as well as the increased resistance of the plants to one or more herbicides.

[0305] Commercially available examples of such plants, plant parts or plant seeds that may be treated with preference in accordance with the invention include commercial products, such as plant seeds, sold or distributed under the GENUITY®, DROUGHTGARD®, SMARTSTAX®, RIB COMPLETE®, ROUNDUP READY®, VT DOUBLE PRO®, VT TRIPLE PRO®, BOLLGARD II®, ROUNDUP READY 2 YIELD®, YIELDGARD®, ROUNDUP READY® 2 XTEND™, INTACTA RR2 PRO®, VISTIVE GOLD®, and/or XTENDFLEX™ trade names.

[0306] The invention will now be described with reference to the following examples. It should be appreciated that these examples are not intended to limit the scope of the claims to the invention but are rather intended to be exemplary of certain embodiments. Any variations in the exemplified methods that occur to the skilled artisan are intended to fall within the scope of the invention.

### EXAMPLES

### Example 1. Editing Strategies

[0307] A strategy was designed to generate knock-out or knock-down edits in the soybean HECT E3 ubiquitin ligase genes of 11g107500 (SEQ ID NO:72) and 12g032500 (SEQ ID NO:73). To generate a range of alleles, multiple CRISPR-Cas guide nucleic acids comprising spacers (SEQ ID NOs:94-97) (see Table 1) having complementarity to targets within the soybean HECT E3 ubiquitin ligase genes were designed and placed into various constructs.

[0308] Lines carrying edits in the HECT E3 ubiquitin ligase genes were screened and those that showed about 10% of the sequencing reads having edits in the targeted gene were advanced to the next generation.

[0309] Additional guide constructs comprising different spacers (see, e.g., Table 1) were designed to engineer targeted edits to generate knock-out or knock-down versions of other soybean HECT E3 ubiquitin ligase genes.

TABLE 1
Example spacers for targeting HECT E3 ubiquitin ligase genes

| Spacer name | Seq ID |
|---|---|
| pWsp1159 | 94 |
| pWsp1160 | 95 |
| pWsp1161 | 96 |
| pWsp1162 | 97 |
| pWsp1236 | 98 |
| pWsp1237 | 99 |
| pWsp1238 | 100 |
| pWsp1239 | 101 |
| PWsp1384 | 102 |
| pWsp1385 | 103 |
| pWsp1386 | 104 |
| pWsp1387 | 105 |
| pWsp1388 | 106 |
| pWsp1389 | 107 |
| pWsp1390 | 108 |
| pWsp1391 | 109 |
| pWsp1392 | 110 |
| pWsp1393 | 111 |
| pWsp1394 | 112 |
| pWsp1397 | 113 |
| pWsp1398 | 114 |
| pWsp1399 | 115 |
| pWsp1340 | 116 |
| pWsp1341 | 117 |
| pWsp1342 | 118 |

### Example 2. Characterization of Knock-Out Edits in HECT E3 Ubiquitin Ligase Genes

[0310] The editing construct, pWISE2921, containing the spacers pWsp1159 (SEQ ID NO:94), pWsp1161 (SEQ ID NO:96), pWsp1160 (SEQ ID NO:95) and pWsp1162 (SEQ ID NO:97) was developed to generate knock-out edits in the HECT E3 genes of 11g107500 (SEQ ID NO:72) and 12g032500 (SEQ ID NO:73).

[0311] Two soybean plants, CE50904 and CE50894, were identified which contained a range of edits in one or both of the targeted HECT E3 genes 11g107500 (SEQ ID NO:72) and 12g032500 (SEQ ID NO:73). These soybean plants were transferred to the greenhouse to set seed and the resulting E1 seed from each plant was collected. The range of edited alleles of the HECT E3 genes segregated in the E1 generation. The E1 generation was planted in the greenhouse and the plants were allowed to set seed to generate the E2 seed population. The E2 seed was germinated in the greenhouse and the resulting plant populations were analyzed for the range of edited alleles of the HECT E3 genes as well as for altered seed phenotypes such as seed size and yield.

### Example 3. Characterization of Knock-Out Edits of HECT E3 Gene 12g032500

[0312] The E0 plant CE50894 gave rise to the E1 plant CE75549. CE75549 was allowed to set seed giving rise to the E2 population which was planted for phenotype analysis as described below. Analysis of the edited HECT E3 gene 12g032500 in CE75549 showed that this gene was homozygous for a 5 bp deletion as described in Table 2.

[0313] As described in Example 2, the E0 plant CE50904 gave rise to the E1 plant CE75626. CE75626 was allowed to set seed giving rise to the E2 population which was planted for phenotype analysis as described below. Analysis of the edited HECT E3 gene 12g032500 in CE75626 showed that this gene was homozygous for a 10 bp deletion as described in Table 2.

[0314] Twenty-seven E2 populations derived from CE75549 and fifteen E2 populations derived from CE75626 were evaluated for seed phenotypes such as seed length, seed area and 100 seed weight. Seed length and seed area were determined by imaging the collected seeds and directly measuring length and area from the seed images. None of the seed collected from the E2 plants displayed an altered seed phenotype. These observations suggest that these particular edits of 12g032500 alone were not sufficient to generate the desired altered seed phenotypes.

TABLE 2
Edited alleles of HECT E3 gene 12g032500

| | | Description of edited |
|---|---|---|
| E1 plant | Edited alleles | allele/SEQ ID NO |
| CE75549 | 5 bp deletion starting | Homozygous deletion results |
| | at bp 3480 in 12g032500 | in an out of frame mutation |
| | (SEQ ID NO: 73); deleted | in 12g032500 leading to an |
| | sequence (ACAAC) | early stop codon, see edited |
| | | sequence SEQ ID NO: 119 |
| CE75626 | 10 bp deletion starting | Homozygous deletion results |
| | at bp 3374 in 12g032500 | in an out of frame mutation |
| | (SEQ ID NO: 73); deleted | in 12g032500 leading to an |
| | sequence (CGCTCCCGTT | early stop codon, see edited |
| | SEQ ID NO: 126) | sequence SEQ ID NO: 120 |

### Example 4. Characterization of Knock-Out Edits of HECT E3 Gene 11g107500

[0315] The E0 plant CE50904 gave rise to the E1 plant CE75600. CE75600 was homozygous for an 11 bp deletion in 11g107500 (SEQ ID NO:72) and also homozygous for the same 10 bp deletion described in Example 3 for 12g032500 (SEQ ID NO:73). The E0 plant CE50904 also gave rise to the E1 plant CE75640, which was determined to be homozygous for an 11 bp deletion in 11g107500 (SEQ ID NO:72). The edited allele information is summarized below in Table 3.

[0316] The E1 plants CE75600 and CE75640 were grown in the greenhouse and allowed to set E2 seed which was also planted in the greenhouse. The E2 plants were evaluated for yield traits and were also allowed to set E3 generation seed. The E3 seed was also evaluated for altered seed phenotypes. A range of plant seed phenotypes were collected by imaging seed and measuring seed area and seed length. When compared to wild type seeds, the E3 seed derived from the E2 populations of CE75640 showed a statistically significant increase in seed area, as well as an increase in 100 seed weight. Altered seed phenotypes were not observed in the E2 populations derived CE75600 suggesting that the edits in 12g032500 interfered with the edited allele of 11g107500. These observations indicate that knock out edits in HECT E3 genes can alter seed architecture in soybean.

TABLE 3
Edited alleles from Example 4

| E1 plant | Edited alleles | Description of edited allele/SEQ ID NO |
|---|---|---|
| CE75600 | 11 bp deletion starting at bp 1513 of 11gl07500 | Homozygous deletion results in |
| | (SEQ ID NO: 72); deleted sequence | an out of frame mutation |
| | (CATCCAATACT SEQ ID NO: 127) | leading to an early stop codon, |
| | 10 bp deletion starting at bp 3374 in 12g032500 | see edited sequence SEQ ID NO: 121 |
| | (SEQ ID NO: 73); deleted sequence (CGCTCCCGTT | Homozygous deletion results in |
| | SEQ ID NO: 126) | an out of frame mutation in |
| | | 12g032500 leading to an early |
| | | stop codon, see edited sequence |
| | | SEQ ID NO: 120 |
| CE75640 | 11 bp deletion starting at bp 1513 of 11gl07500 | Homozygous deletion results in |
| | (SEQ ID NO: 72); deleted sequence | an out of frame mutation |
| | (CATCCAATACT SEQ ID NO:127) | leading to an early stop codon, |
| | | see edited sequence SEQ ID NO: 121 |

### Example 5: Catalytic Site Variants in Corn

[0317] A strategy for simultaneously editing the catalytic site of both of the corn HECT E3a gene Zm00001d004139 and the HECT E3b gene Zm00001d014920 was designed. The CRISPR-Cas editing construct contained the spacers PWsp1401 (CCTAGTGTCATGACTTGCGCCAA SEQ ID NO:117) and PWsp1402 (CCTAGTGTGATGACGTGCGCCAA SEQ ID NO:118) were introduced into dried excised maize embryos using Agrobacterium. Transformed tissue was maintained in vitro with antibiotic selection to regenerate positive transformants, which were regenerated into plants. The regenerated plants were screened for edits in the target genes by next generation sequencing and those plants that showed about 10% of the sequencing reads having edits in the targeted gene were transferred to the greenhouse to set seed. Tissue was collected from the regenerated plants (E0 generation) for DNA extraction and subsequent molecular screening was employed to identify edits in the HECT E3 target genes.

TABLE 4
Edited alleles from Example 5

| | | Description of edited |
|---|---|---|
| Target gene | Edited allele | allele/SEQ ID NO |
| Zm00001d004139 | 6 bp deletion in Zm00001d004139 starting | In frame deletion within the |
| SEQ ID NO: 76 | at bp 18151; deleted sequence (CTTGCG) | catalytic site, see edited |
| | | sequence SEQ ID NO: 122 |
| Zm00001d004139 | 26 bp deletion in Zm00001d004139 starting | Out of frame mutation |
| SEQ ID NO: 76 | at bp 18134; deleted sequence | resulting in an early stop |
| | (TTTGCCTAGTGTCATGACTTGCGCCA | codon, see edited sequence |
| | SEQ ID NO: 128) | SEQ ID NO: 124 |
| Zm00001d014920 | 6 bp deletion in Zm0000d1d014920 starting | In frame deletion within the |
| SEQ ID NO: 77 | at bp 11505; deleted sequence (CGCCAA) | catalytic site, see edited |
| (allele A) | | sequence SEQ ID NO: 123 |
| Zm00001d014920 | 6 bp deletion in Zm00001d014920 | In frame deletion within the |
| SEQ ID NO: 77 | starting at bp 11502; deleted sequence | catalytic site, see edited |
| (allele B) | (GTGCGC) | sequence SEQ ID NO: 125 |

[0318] Several E0 plants were allowed to set seed to generate E1 seed and 100 seed weight was determined at the individual plant level. As provided in Table 4, all of the edits showed an increase in 100 seed weight. These observations suggest that the edits in the catalytic site of the corn HECT E3 genes can lead to increased seed size.

TABLE 5
Determination of 100 seed weight of
seed produced by edited corn plants.

| Genotype | Genotype | |
|---|---|---|
| Zm00001d004139 | Zm00001d014920 | |
| (SEQ ID NO: 76) | (SEQ ID NO: 77) | 100 kernel weight (g) |
| Heterozygous 26 bp | WT | 26.4 |
| deletion | | |
| Heterozygous 6 bp | WT | 27.8 |
| deletion | | |
| Homozygous 6 bp | WT | 26.5 |
| deletion | | |
| WT | Homozygous 6 bp | 24 |
| | deletion (allele A) | |
| WT | Heterozygous 6 bp | 31 |
| | deletion (allele A) | |
| WT | Heterozygous 6 bp | 26 |
| | deletion (allele B) | |
| WT | WT | 22.3 |

“WT” refers to a control isogenic plant.

[0319] The foregoing is illustrative of the present invention and is not to be construed as limiting thereof. The invention is defined by the following claims, with equivalents of the claims to be included therein.

The application's sequence listing, which the Patent Office published only in electronic form, follows.

SEQUENCE LISTING (128 sequences)

SEQ ID NO: 1 - protein, 1228 aa, Unknown
  Lachnospiraceae sp.
MSKLEKFTNCYSLSKTLRFKAIPVGKTQENIDNKRLLVEDEKRAEDYKGVKKLLDRYYLSFINDVLHSIKLKNLNNYISLFRKKTRTEKENKELENLEINLRKEIAKAFKGNEGYKSLFKKDIIETILPEFLDDKDEIALVNSFNGFTTAFTGFFDNRENMFSEEAKSTSIAFRCINENLTRYISNMDIFEKVDAIFDKHEVQEIKEKILNSDYDVEDFFEGEFFNFVLTQEGIDVYNAIIGGFVTESGEKIKGLNEYINLYNQKTKQKLPKFKPLYKQVLSDRESLSFYGEGYTSDEEVLEVFRNTLNKNSEIFSSIKKLEKLFKNFDEYSSAGIFVKNGPAISTISKDIFGEWNVIRDKWNAEYDDIHLKKKAVVTEKYEDDRRKSFKKIGSFSLEQLQEYADADLSVVEKLKEIIIQKVDEIYKVYGSSEKLFDADFVLEKSLKKNDAVVAIMKDLLDSVKSFENYIKAFFGEGKETNRDESFYGDFVLAYDILLKVDHIYDAIRNYVTQKPYSKDKFKLYFQNPQFMGGWDKDKETDYRATILRYGSKYYLAIMDKKYAKCLQKIDKDDVNGNYEKINYKLLPGPNKMLPKVFFSKKWMAYYNPSEDIQKIYKNGTFKKGDMFNLNDCHKLIDFFKDSISRYPKWSNAYDFNFSETEKYKDIAGFYREVEEQGYKVSFESASKKEVDKLVEEGKLYMFQIYNKDFSDKSHGTPNLHTMYFKLLFDENNHGQIRLSGGAELFMRRASLKKEELVVHPANSPIANKNPDNPKKTTTLSYDVYKDKRFSEDQYELHIPIAINKCPKNIFKINTEVRVLLKHDDNPYVIGIDRGERNLLYIVVVDGKGNIVEQYSLNEIINNFNGIRIKTDYHSLLDKKEKERFEARQNWTSIENIKELKAGYISQVVHKICELVEKYDAVIALEDLNSGFKNSRVKVEKQVYQKFEKMLIDKLNYMVDKKSNPCATGGALKGYQITNKFESFKSMSTQNGFIFYIPAWLTSKIDPSTGFVNLLKTKYTSIADSKKFISSFDRIMYVPEEDLFEFALDYKNFSRTDADYIKKWKLYSYGNRIRIFRNPKKNNVFDWEEVCLTSAYKELFNKYGINYQQGDIRALLCEQSDKAFYSSFMALMSLMLQMRNSITGRTDVDFLISPVKNSDGIFYDSRNYEAQENAILPKNADANGAYNIARKVLWAIGQFKKAEDEKLDKVKIAISNKEWLEYAQTSVKH

SEQ ID NO: 2 - protein, 1307 aa, Acidaminococcus sp.
MTQFEGFTNLYQVSKTLRFELIPQGKTLKHIQEQGFIEEDKARNDHYKELKPIIDRIYKTYADQCLQLVQLDWENLSAAIDSYRKEKTEETRNALIEEQATYRNAIHDYFIGRTDNLTDAINKRHAEIYKGLFKAELFNGKVLKQLGTVTTTEHENALLRSFDKFTTYFSGFYENRKNVFSAEDISTAIPHRIVQDNFPKFKENCHIFTRLITAVPSLREHFENVKKAIGIFVSTSIEEVFSFPFYNQLLTQTQIDLYNQLLGGISREAGTEKIKGLNEVLNLAIQKNDETAHIIASLPHRFIPLFKQILSDRNTLSFILEEFKSDEEVIQSFCKYKTLLRNENVLETAEALFNELNSIDLTHIFISHKKLETISSALCDHWDTLRNALYERRISELTGKITKSAKEKVQRSLKHEDINLQEIISAAGKELSEAFKQKTSEILSHAHAALDQPLPTTLKKQEEKEILKSQLDSLLGLYHLLDWFAVDESNEVDPEFSARLTGIKLEMEPSLSFYNKARNYATKKPYSVEKFKLNFQMPTLASGWDVNKEKNNGAILFVKNGLYYLGIMPKQKGRYKALSFEPTEKTSEGFDKMYYDYFPDAAKMIPKCSTQLKAVTAHFQTHTTPILLSNNFIEPLEITKEIYDLNNPEKEPKKFQTAYAKKTGDQKGYREALCKWIDFTRDFLSKYTKTTSIDLSSLRPSSQYKDLGEYYAELNPLLYHISFQRIAEKEIMDAVETGKLYLFQIYNKDFAKGHHGKPNLHTLYWTGLFSPENLAKTSIKLNGQAELFYRPKSRMKRMAHRLGEKMLNKKLKDQKTPIPDTLYQELYDYVNHRLSHDLSDEARALLPNVITKEVSHEIIKDRRFTSDKFFFHVPITLNYQAANSPSKFNQRVNAYLKEHPETPIIGIDRGERNLIYITVIDSTGKILEQRSLNTIQQFDYQKKLDNREKERVAARQAWSVVGTIKDLKQGYLSQVIHEIVDLMIHYQAVVVLENLNFGFKSKRTGIAEKAVYQQFEKMLIDKLNCLVLKDYPAEKVGGVLNPYQLTDQFTSFAKMGTQSGFLFYVPAPYTSKIDPLTGFVDPFVWKTIKNHESRKHFLEGFDFLHYDVKTGDFILHFKMNRNLSFQRGLPGFMPAWDIVFEKNETQFDAKGTPFIAGKRIVPVIENHRFTGRYRDLYPANELIALLEEKGIVFRDGSNILPKLLENDDSHAIDTMVALIRSVLQMRNSNAATGEDYINSPVRDLNGVCFDSRFQNPEWPMDADANGAYHIALKGQLLLNHLKESKDLKLQNGISNQDWLAYIQELRN

SEQ ID NO: 3 - protein, 1241 aa, Butyrivibrio proteoclasticus
MLLYENYTKRNQITKSLRLELRPQGKTLRNIKELNLLEQDKAIYALLERLKPVIDEGIKDIARDTLKNCELSFEKLYEHFLSGDKKAYAKESERLKKEIVKTLIKNLPEGIGKISEINSAKYLNGVLYDFIDKTHKDSEEKQNILSDILETKGYLALFSKFLTSRITTLEQSMPKRVIENFEIYAANIPKMQDALERGAVSFAIEYESICSVDYYNQILSQEDIDSYNRLISGIMDEDGAKEKGINQTISEKNIKIKSEHLEEKPFRILKQLHKQILEEREKAFTIDHIDSDEEVVQVTKEAFEQTKEQWENIKKINGFYAKDPGDITLFIVVGPNQTHVLSQLIYGEHDRIRLLLEEYEKNTLEVLPRRTKSEDARYDKFVNAVPKKVAKESHTFDGLQKMTGDDRLFILYRDELARNYMRIKEAYGTFERDILKSRRGIKGNRDVQESLVSFYDELTKFRSALRIINSGNDEKADPIFYNTFDGIFEKANRTYKAENLCRNYVTKSPADDARIMASCLGTPARLRTHWWNGEENFAINDVAMIRRGDEYYYFVLTPDVKPVDLKTKDETDAQIFVQRKGAKSFLGLPKALFKCILEPYFESPEHKNDKNCVIEEYVSKPLTIDRRAYDIFKNGTFKKTNIGIDGLTEEKFKDDCRYLIDVYKEFIAVYTRYSCFNMSGLKRADEYNDIGEFFSDVDTRLCTMEWIPVSFERINDMVDKKEGLLFLVRSMFLYNRPRKPYERTFIQLFSDSNMEHTSMLLNSRAMIQYRAASLPRRVTHKKGSILVALRDSNGEHIPMHIREAIYKMKNNFDISSEDFIMAKAYLAEHDVAIKKANEDIIRNRRYTEDKFFLSLSYTKNADISARTLDYINDKVEEDTQDSRMAVIVTRNLKDLTYVAVVDEKNNVLEEKSLNEIDGVNYRELLKERTKIKYHDKTRLWQYDVSSKGLKEAYVELAVTQISKLATKYNAVVVVESMSSTFKDKFSFLDEQIFKAFEARLCARMSDLSFNTIKEGEAGSISNPIQVSNNNGNSYQDGVIYFLNNAYTRTLCPDTGFVDVFDKTRLITMQSKRQFFAKMKDIRIDDGEMLFTFNLEEYPTKRLLDRKEWTVKIAGDGSYFDKDKGEYVYVNDIVREQIIPALLEDKAVFDGNMAEKFLDKTAISGKSVELIYKWFANALYGIITKKDGEKIYRSPITGTEIDVSKNTTYNFGKKFMFKQEYRGDGDFLDAFLNYMQAQDIAV

SEQ ID NO: 4 - protein, 1238 aa, Candidatus Methanoplasma termitum
MNNYDEFTKLYPIQKTIRFELKPQGRTMEHLETFNFFEEDRDRAEKYKILKEAIDEYHKKFIDEHLTNMSLDWNSLKQISEKYYKSREEKDKKVFLSEQKRMRQEIVSEFKKDDRFKDLFSKKLFSELLKEEIYKKGNHQEIDALKSFDKFSGYFIGLHENRKNMYSDGDEITAISNRIVNENFPKFLDNLQKYQEARKKYPEWIIKAESALVAHNIKMDIVFSLEYFNKVLNQEGIQRYNLALGGYVTKSGEKMMGLNDALNLAHQSEKSSKGRIHMTPLFKQILSEKESFSYIPDVFTEDSQLLPSIGGFFAQIENDKDGNIFDRALELISSYAEYDTERIYIRQADINRVSNVIFGEWGTLGGLMREYKADSINDINLERTCKKVDKWLDSKEFALSDVLEAIDRTGNNDAFNEYISKMRTAREKIDAARKEMKFISEKISGDEESIHIIKTLLDSVQQFLHFFNLFKARQDIPLDGAFYAEFDEVHSKLFAIVPLYNKVRNYLTKNNLNTKKIKLNFKNPTLANGWDQNKVYDYASLIFLRDGNYYLGIINPKRKKNIKFEQGSGNGPFYRKMVYKQIPGPNKNLRPVFLTSTKGKKEYKPSKEIIEGYEADKHIRGDKFDLDFCHKLIDFFKESIEKHKDWSKFNFYFSPTESYGDISEFYLDVEKQGYRMHFENISAETIDEYVEKGDLFLFQIYNKDFVKAATGKKDMHTIYWNAAFSPENLQDVVVKLNGEAELFYRDKSDIKEIVHREGEILVNRTYNGRTPVPDKIHKKLTDYHNGRTKDLGEAKEYLDKVRYFKAHYDITKDRRYLNDKIYFHVPLTLNFKANGKKNLNKMVIEKFLSDEKAHIIGIDRGERNLLYYSIIDRSGKIIDQQSLNVIDGFDYREKLNQREIEMKDARQSWNAIGKIKDLKEGYLSKAVHEITKMAIQYNAIVVMEELNYGFKRGRFKVEKQIYQKFENMLIDKMNYLVFKDAPDESPGGVLNAYQLTNPLESFAKLGKQTGILFYVPAAYTSKIDPTTGFVNLFNTSSKTNAQERKEFLQKFESISYSAKDGGIFAFAFDYRKFGTSKTDHKNVWTAYTNGERMRYIKEKKRNELFDPSKEIKEALTSSGIKYDGGQNILPDILRSNNNGLIYTMYSSFIAAIQMRVYDGKEDYIISPIKNSKGEFFRTDPKRRELPIDADANGAYNIALRGELTMRAIAEKFDPDSEKMAKLELKHKDWFEFMQTRGD

SEQ ID NO: 5 - protein, 1281 aa, Eubacterium eligens
MNGNRSIVYREFVGVIPVAKTLRNELRPVGHTQEHIIQNGLIQEDELRQEKSTELKNIMDDYYREYIDKSLSGVTDLDFTLLFELMNLVQSSPSKDNKKALEKEQSKMREQICTHLQSDSNYKNIFNAKLLKEILPDFIKNYNQYDVKDKAGKLETLALFNGFSTYFTDFFEKRKNVFTKEAVSTSIAYRIVHENSLIFLANMTSYKKISEKALDEIEVIEKNNQDKMGDWELNQIFNPDFYNMVLIQSGIDFYNEICGVVNAHMNLYCQQTKNNYNLFKMRKLHKQILAYTSTSFEVPKMFEDDMSVYNAVNAFIDETEKGNIIGKLKDIVNKYDELDEKRIYISKDFYETLSCFMSGNWNLITGCVENFYDENIHAKGKSKEEKVKKAVKEDKYKSINDVNDLVEKYIDEKERNEFKNSNAKQYIREISNIITDTETAHLEYDDHISLIESEEKADEMKKRLDMYMNMYHWAKAFIVDEVLDRDEMFYSDIDDIYNILENIVPLYNRVRNYVTQKPYNSKKIKLNFQSPTLANGWSQSKEFDNNAIILIRDNKYYLAIFNAKNKPDKKIIQGNSDKKNDNDYKKMVYNLLPGANKMLPKVFLSKKGIETFKPSDYIISGYNAHKHIKTSENFDISFCRDLIDYFKNSIEKHAEWRKYEFKFSATDSYSDISEFYREVEMQGYRIDWTYISEADINKLDEEGKIYLFQIYNKDFAENSTGKENLHTMYFKNIFSEENLDKIIKLNGQAELFYRRASVKNPVKHKKDSVLVNKTYKNQLDNGDVVRIPIPDDIYNEIYKMYNGYIKESDLSEAAKEYLDKVEVRTAQKDIVKDYRYTVDKYFIHTPITINYKVTARNNVNDMVVKYIAQNDDIHVIGIDRGERNLIYISVIDSHGNIVKQKSYNILNNYDYKKKLVEKEKTREYARKNWKSIGNIKELKEGYISGVVHEIAMLIVEYNAIIAMEDLNYGFKRGRFKVERQVYQKFESMLINKLNYFASKEKSVDEPGGLLKGYQLTYVPDNIKNLGKQCGVIFYVPAAFTSKIDPSTGFISAFNFKSISTNASRKQFFMQFDEIRYCAEKDMFSFGFDYNNFDTYNITMGKTQWTVYTNGERLQSEFNNARRTGKTKSINLTETIKLLLEDNEINYADGHDIRIDMEKMDEDKKSEFFAQLLSLYKLTVQMRNSYTEAEEQENGISYDKIISPVINDEGEFFDSDNYKESDDKECKMPKDADANGAYCIALKGLYEVLKIKSEWTEDGFDRNCLKLPHAEWLDFIQNKRYE

SEQ ID NO: 6 - protein, 1300 aa, Francisella novicida
MSIYQEFVNKYSLSKTLRFELIPQGKTLENIKARGLILDDEKRAKDYKKAKQIIDKYHQFFIEEILSSVCISEDLLQNYSDVYFKLKKSDDDNLQKDFKSAKDTIKKQISEYIKDSEKFKNLFNQNLIDAKKGQESDLILWLKQSKDNGIELFKANSDITDIDEALEIIKSFKGWTTYFKGFHENRKVNYSSNDIPTSIIYRIVDDNLPKFLENKAKYESLKDKAPEAINYEQIKKDLAEELTFDIDYKTSEVNQRVFSLDEVFEIANFNNYLNQSGITKFNTIIGGKFVNGENTKRKGINEYINLYSQQINDKTLKKYKMSVLFKQILSDTESKSFVIDKLEDDSDVVTTMQSFYEQIAAFKTVEEKSIKETLSLLFDDLKAQKLDLSKIYFKNDKSLTDLSQQVFDDYSVIGTAVLEYITQQIAPKNLDNPSKKEQELIAKKTEKAKYLSLETIKLALEEFNKHRDIDKQCRFEEILANFAAIPMIFDEIAQNKDNLAQISIKYQNQGKKDLLQASAEDDVKAIKDLLDQTNNLLHKLKIFHISQSEDKANILDKDEHFYLVFEECYFELANIVPLYNKIRNYITQKPYSDEKFKLNFENSTLANGWDKNKEPDNTAILFIKDDKYYLGVMNKKNNKIFDDKAIKENKGEGYKKIVYKLLPGANKMLPKVFFSAKSIKFYNPSEDILRIRNHSTHTKNGSPQKGYEKFEFNIEDCRKFIDFYKQSISKHPEWKDFGFRFSDTQRYNSIDEFYREVENQGYKLTFENISESYIDSVVNQGKLYLFQIYNKDFSAYSKGRPNLHTLYWKALFDERNLQDVVYKLNGEAELFYRKQSIPKKITHPAKEAIANKNKDNPKKESVFEYDLIKDKRFTEDKFFFHCPITINFKSSGANKFNDEINLLLKEKANDVHILSIDRGERHLAYYTLVDGKGNIIKQDTFNIIGNDRMKTNYHDKLAAIEKDRDSARKDWKKINNIKEMKEGYLSQVVHEIAKLVIEYNAIVVFEDLNFGFKRGRFKVEKQVYQKLEKMLIEKLNYLVFKDNEFDKTGGVLRAYQLTAPFETFKKMGKQTGIIYYVPAGFTSKICPVTGFVNQLYPKYESVSKSQEFFSKFDKICYNLDKGYFEFSFDYKNFGDKAAKGKWTIASFGSRLINFRNSDKNHNWDTREVYPTKELEKLLKDYSIEYGHGECIKAAICGESDKKFFAKLTSVLNTILQMRNSKTGTELDYLISPVADVNGNFFDSRQAPKNMPQDADANGAYHIGLKGLMLLGRIKNNQEGKKLNLVIKNEEYFEFVQNRNN

SEQ ID NO: 7 - protein, 1206 aa, Unknown
  Lachnospiraceae sp.
MYYESLTKQYPVSKTIRNELIPIGKTLDNIRQNNILESDVKRKQNYEHVKGILDEYHKQLINEALDNCTLPSLKIAAEIYLKNQKEVSDREDFNKTQDLLRKEVVEKLKAHENFTKIGKKDILDLLEKLPSISEDDYNALESFRNFYTYFTSYNKVRENLYSDKEKSSTVAYRLINENFPKFLDNVKSYRFVKTAGILADGLGEEEQDSLFIVETFNKTLTQDGIDTYNSQVGKINSSINLYNQKNQKANGFRKIPKMKMLYKQILSDREESFIDEFQSDEVLIDNVESYGSVLIESLKSSKVSAFFDALRESKGKNVYVKNDLAKTAMSVIVFENWRTFDDLLNQEYDLANENKKKDDKYFEKRQKELKKNKSYSLEHLCNLSEDSCNLIENYIHQISDDIENIIINNETFLRIVINEHDRSRKLAKNRKAVKAIKDFLDSIKVLERELKLINSSGQELEKDLIVYSAHEELLVELKQVDSLYNMTRNYLTKKPFSTEKVKLNFNRSTLLNGWDRNKETDNLGVLLLKDGKYYLGIMNTSANKAFVNPPVAKTEKVFKKVDYKLLPVPNQMLPKVFFAKSNIDFYNPSSEIYSNYKKGTHKKGNMFSLEDCHNLIDFFKESISKHEDWSKFGFKFDTQASYNDISEFYREVEKQGYKLTYTDIDETYINDLIERNELYLFQIYNKDFSMYSKGKLNLHTLYFMMLFDQRNIDDVVYKLNGEAEVFYRPASISEDELIIHKAGEEIKNKNPNRARTKETSTFSYDIVKDKRYSKDKFTLHIPITMNFGVDEVKRFNDAVNSAIRIDENVNVIGIDRGERNLLYVVVIDSKGNILEQISLNSIINKEYDIETDYHALLDEREGGRDKARKDWNTVENIRDLKAGLYLQVVNVVAKLVLKYNAIICLEDLNFGFKRGRQKVEKQVYQKFEKMLIDKLNYLVIDKSREQTSPKELGGALNALQLTSKFKSFKELGKQSGVIYYVPAYLTSKIDPTTGFANLFYMKCENVEKSKRFFDGFDFIRFNALENVFEFGFDYRSFTQRACGINSKWTVCTNGERIIKYRNPDKNNMFDEKVVVVTDEMKNLFEQYKIPYEDGRNVKDMIISNEEAEFYRRLYRLLQQTLQMRNSTSDGTRDYIISPVKNKREAYFNSELSDGSVPKDADANGAYNIARKGLWVLEQIRQKSEGEKINLAMTNAEWLEYAQTHLL

SEQ ID NO: 8 - protein, 1233 aa, Unknown
  Lachnospiraceae sp.
MDYGNGQFERRAPLTKTITLRLKPIGETRETIREQKLLEQDAAFRKLVETVTPIVDDCIRKIADNALCHFGTEYDFSCLGNAISKNDSKAIKKETEKVEKLLAKVLTENLPDGLRKVNDINSAAFIQDTLTSFVQDDADKRVLIQELKGKTVLMQRFLTTRITALTVWLPDRVFENFNIFIENAEKMRILLDSPLNEKIMKFDPDAEQYASLEFYGQCLSQKDIDSYNLIISGIYADDEVKNPGINEIVKEYNQQIRGDKDESPLPKLKKLHKQILMPVEKAFFVRVLSNDSDARSILEKILKDTEMLPSKIIEAMKEADAGDIAVYGSRLHELSHVIYGDHGKLSQIIYDKESKRISELMETLSPKERKESKKRLEGLEEHIRKSTYTFDELNRYAEKNVMAAYIAAVEESCAEIMRKEKDLRTLLSKEDVKIRGNRHNTLIVKNYFNAWTVFRNLIRILRRKSEAEIDSDFYDVLDDSVEVLSLTYKGENLCRSYITKKIGSDLKPEIATYGSALRPNSRWWSPGEKFNVKFHTIVRRDGRLYYFILPKGAKPVELEDMDGDIECLQMRKIPNPTIFLPKLVFKDPEAFFRDNPEADEFVFLSGMKAPVTITRETYEAYRYKLYTVGKLRDGEVSEEEYKRALLQVLTAYKEFLENRMIYADLNFGFKDLEEYKDSSEFIKQVETHNTFMCWAKVSSSQLDDLVKSGNGLLFEIWSERLESYYKYGNEKVLRGYEGVLLSILKDENLVSMRTLLNSRPMLVYRPKESSKPMVVHRDGSRVVDRFDKDGKYIPPEVHDELYRFFNNLLIKEKLGEKARKILDNKKVKVKVLESERVKWSKFYDEQFAVTFSVKKNADCLDTTKDLNAEVMEQYSESNRLILIRNTTDILYYLVLDKNGKVLKQRSLNIINDGARDVDWKERFRQVTKDRNEGYNEWDYSRTSNDLKEVYLNYALKEIAEAVIEYNAILIIEKMSNAFKDKYSFLDDVTFKGFETKKLAKLSDLHFRGIKDGEPCSFTNPLQLCQNDSNKILQDGVIFMVPNSMTRSLDPDTGFIFAINDHNIRTKKAKLNFLSKFDQLKVSSEGCLIMKYSGDSLPTHNTDNRVWNCCCNHPITNYDRETKKVEFIEEPVEELSRVLEENGIETDTELNKLNERENVPGKVVDAIYSLVLNYLRGTVSGVAGQRAVYYSPVTGKKYDISFIQAMNLNRKCDYYRIGSKERGEWTDFVAQLIN

SEQ ID NO: 9 - protein, 1227 aa, Unknown
  Lachnospiraceae sp.
MSKLEKFTNCYSLSKTLRFKAIPVGKTQENIDNKRLLVEDEKRAEDYKGVKKLLDRYYLSFINDVLHSIKLKNLNNYISLFRKKTRTEKENKELENLEINLRKEIAKAFKGNEGYKSLFKKDIIETILPEFLDDKDEIALVNSFNGFTTAFTGFFDNRENMFSEEAKSTSIAFRCINENLTRYISNMDIFEKVDAIFDKHEVQEIKEKILNSDYDVEDFFEGEFFNFVLTQEGIDVYNAIIGGFVTESGEKIKGLNEYINLYNQKTKQKLPKFKPLYKQVLSDRESLSFYGEGYTSDEEVLEVFRNTLNKNSEIFSSIKKLEKLFKNFDEYSSAGIFVKNGPAISTISKDIFGEWNVIRDKWNAEYDDIHLKKKAVVTEKYEDDRRKSFKKIGSFSLEQLQEYADADLSVVEKLKEIIIQKVDEIYKVYGSSEKLFDADFVLEKSLKKNDAVVAIMKDLLDSVKSFENYIKAFFGEGKETNRDESFYGDFVLAYDILLKVDHIYDAIRNYVTQKPYSKDKFKLYFQNPQFMGGWDKDKETDYRATILRYGSKYYLAIMDKKYAKCLQKIDKDDVNGNYEKINYKLLPGPNKMLPKVFFSKKWMAYYNPSEDIQKIYKNGTFKKGDMFNLNDCHKLIDFFKDSISRYPKWSNAYDFNFSETEKYKDIAGFYREVEEQGYKVSFESASKKEVDKLVEEGKLYMFQIYNKDFSDKSHGTPNLHTMYFKLLFDENNHGQIRLSGGAELFMRRASLKKEELVVHPANSPIANKNPDNPKKTTTLSYDVYKDKRFSEDQYELHIPIANINKCPKNIFKINTEVRVLLKHDDNPYVIGIDRGERNLLYIVVVDGKGNIVEQYSLNEIINNFNGIRIKTDYHSLLDKKEKERFEARQNWTSIENIKELKAGYISQVVHKICELVEKYDAVIALEDLNSGFKNSRVKVEKQVYQKFEKMLIDKLNYMVDKKSNPCATGGALKGYQITNKFESFKSMSTQNGFIFYIPAWLTSKIDPSTGFVNLLKTKYTSIADKKFISSFDRIMYVPEEDLFEFALDYKNFSRTDADYIKKWKLYSYGNRIRIFRNPKKNNVFDWEEVCLTSAYKELFNKYGINYQQGDIRALLCEQSDKAFYSSFMALMSLMLQMRNSITGRTDVDFLISPVKNSDGIFYDSRNYEAQENAILPKNADANGAYNIARKVLWAIGQFKKAEDEKLDKVKIASNKEWLEYAQTSVKH

SEQ ID NO: 10 - protein, 1264 aa, Leptospira inadai
MEDYSGFVNIYSIQKTLRFELKPVGKTLEHIEKKGFLKKDKIRAEDYKAVKKIIDKYHRAYIEEVFDSVLHQKKKKDKTRFSTQFIKEIKEFSELYYKTEKNIPDKERLEALSEKLRKMLVGAFKGEFSEEVAEKYNKNLFSKELIRNEIEKFCETDEERKQVSNFKSFTTYFTGFHSNRQNIYSDEKKSTAIGYRIIHQNLPKFLDNLKIIESIQRRFKDFPWSDLKKNLKKIDKNIKLTEYFSIDGFVNVLNQKGIDAYNTILGGKSEESGEKIQGLNEYINLYRQKNNIDRKNPLNVKILFKQILGDRETKSFIPEAFPDDQSVLNSITEFAKYLKLDKKKKSIIAELKKFLSSFNRYELDGIYLANDNSLASISTFLFDDWSFIKKSVSFKYDESVGDPKKKIKSPLKYEKEKEKWLKQKYYTISFLNDAIESYSKSQDEKRVKIRLEAYFAEFKSKDDAKKQFDLLERIEEAYAIVEPLLGAEYPRDRNLKADKKEVGKIKDFLDSIKSLQFFLKPLLSAEIFDEKDLGFYNQLEGYYEEIDISGHLYNKVRNYLTGKIYSKEKFKLNFENSTLLKGWDENREVANLCVIFREDQKYYLGVMDKENNTILSDIPKVKPNELFYEKMVYKLIPTPHMQLPRIIFSSDNLSIYNPSKSILKIREAKSFKEGKNFKLKDCHKFIDFYKESISKNEDWSRFDFKFSKTSSYENISEFYREVERQGYNLDFKKVSKFYIDSLVEDGKLYLFQIYNKDFSIFSKGKPNLHTIYFRSLFSKENLKDVCLKLNGEAEMFFRKKSINYDEKKKREGHHPELFEKLKYPILKDKRYSEDKFQFHLPISLNFKSKERLNFNLKVNEFLKRNKDINIIGIDRGERNLLYLVMINQKGEILKQTLLDSMQSGKGRPEINYKEKLQEKEIERDKARKSWGTVENIKELKEGYLSIVIHQISKLMVENNAIVVLEDLNIGFKRGRQKVERQVYQKFEKMLIDKLNFLVFKENKPTEPGGVLKAYQLTDEFQSFEKLSKQTGFLFYVPSWNTSKIDPRTGFIDFLHPAYENIEKAKQWINKFDSIRFNSKMDWFEFTADTRKFSENLMLGKNRVWVICTTNVERYFTSKTANSSIQYNSIQITEKLKELFVDIPFSNGQDLKPEILRKNDAVFFKSLLFYIKTTLSLRQNNGKKGEEEKDFILSPVVDSKGRFFNSLEASDDEPKDADANGAYHIALKGLMNLLVLNETKEENLSRPKWKIKNKDWLEFVWERNR

SEQ ID NO: 11 - protein, 1373 aa, Moraxella bovoculi
MLFQDFTHLYPLSKTVRFELFIDRTLEHIHAKNFLSQDETMADMHQKVKVILDDYHRDFIADMMGEVKLTKLAEFYDVYLKFRKNPKDDELQKAQLKDLQAVLRKEIVKPIGNGGKYKAGYDRLFGAKLFKDGKELGDLAKFVIAQEGESSPKLAHLAHFEKFSTYFTGFHDNRKNMYSDEDKHTAIAYRLIHENLPRFIDNLQILTTIKQKHSALYDQIINELTASGLDVSLASHLDGYHKLLTQEGITAYNTLLGGISGEAGSPKIQGINELINSHHNQHCHKSERIAKLRPLHKQILSDGMSVSFLPSKFADDSEMCQAVNEFYRHYADVFAKVQSLFDGFDDHQKDGIYVEHKNLNELSKQAFGDFALLGRVLDGYYVDVVNPEFNERFAKAKTDNAKAKLTKEKDKFIKGVHSLASLEQAIEHYTARHDDESVQAGKLGQYFKHGLAGVDNPIQKIHNNHSTIKGFLERERPAGERALPKIKSGKNPEMTQLRQLKELLDNALNVAHFAKLLTTKTTLDNQDGNFYGEFGVLYDELAKIPTLYNKVRDYLSQKPFSTEKYKLNFGNPTLLNGWDLNKEKDNFGVILQKDGCYYLALLDKAHKKVFDNAPNTGKSIYQKMIYKYLEVRKQFPKVFFSKEAIAINYHPSKELVEIKDKGRQRSDDERLKLYRFILECLKIHPKYDKKFEGAIGDIQLFKKDKKGREVPISEKDLFKDINGIFSSKPKLEMEDFFIGEFKRYNPSQDLVDQYNIYKKIDSNDNRKKENFYNNHPKFKKDLVRYYYESMCKHEEWEESFEFSKKLQDIGCYVDVNELFTEIETRRLNYKISFCNINADYIDELVEQGQLYLFQIYNKDFSPKAHGKPNLHTLYFKALFSEDNLADPIYKLNGEAQIFYRKASLDMNETTIHRAGEVLENKNPDNPKKRQFVYDIIKDKRYTQKDFMLHVPITMNFGVQGMTIKEFNKKVNQSIQQYDEVNVIGIDRGERHLLYLTVINSKGEILEQCSLNDITTASANGTQMTTPYHKILDKREIERLNARVGWGEIETIKELKSGYLSHVVHQISQLMLKYNAIVVLEDLNFGFKRGRFKVEKQIYQNFENALIKKLNHLVLKDKADDEIGSYKNALQLTNNFTDLKSIGKQTGFLFYVPAWNTSKIDPETGFVDLLKPRYENIQASQAFFGKFDKICYNADKDYFEFHIDYAKFTDKAKNSRQIWTICSHGDKRYVYDKTANQNKGAAKGINVNDILKSLFARHHINEKQPNLVMDICQNNDKEFHKSLMYLLKTLLALRYSNASSDEDFILSPVANDEGVFFNSALADDTQPQNADANGAYHIALKGLWLLNELKNSDDLNKVKLAIDNQTWLNFAQNR

SEQ ID NO: 12 - protein, 1352 aa, Unknown
  Parcubacteria bacterium
MENIFDQFIGKYSLSKTLRFELKPVGKTEDFLKINKVFEKDQTIDDSYNQAKFYFDSLHQKFIDAALASDKTSELSFQNFADVLEKQNKIILDKKREMGALRKRDKNAVGIDRLQKEINDAEDIIQKEKEKIYKDVRTLFDNEAESWKTYYQEREVDGKKITESKADLKQKGADFLTAAGILKVLKYEFPEEKEKEFQAKNQPSLFVEEKENPGQKRYIFDSFDKFAGYLTKFQQTKKNLYAADGTSTAVATRIADNFIIFHQNTKVFRDKYKNNHTDLGFDEENIFEIERYKNCLLQREIEHIKNENSYNKIIGRINKKIKEYRDQKAKDTKLTKSDFPFFKNLDKQILGEVEKEKQLIEKTREKTEEDVLIERFKEFIENNEERFTAAKKLMNAFCNGEFESEYEGIYLKNKAINTISRRWFVSDRDFELKLPQQKSKNKSEKNEPKVKKFISIAEIKNAVEELDGDIFKAVFYDKKIIAQGGSKLEQFLVIWKYEFEYLFRDIERENGEKLLGYDSCLKIAKQLGIFPQEKEAREKATAVIKNYADAGLGIFQMMKYFSLDDKDRKNTPGQLSTNFYAEYDGYYKDFEFIKYYNEFRNFITKKPFDEDKIKLNFENGALLKGWDENKEYDFMGVILKKEGRLYLGIMHKNHRKLFQSMGNAKGDNANRYQKMIYKQIADASKDVPRLLLTSKKAMEKFKPSQEILRIKKEKTFKRESKNFSLRDLHALIEYYRNCIPQYSNWSFYDFQFQDTGKYQNIKEFTDDVQKYGYKISFRDIDDEYINQALNEGKMYLFEVVNKDIYNTKNGSKNLHTLYFEHILSAENLNDPVFKLSGMAEIFQRQPSVNEREKITTQKNQCILDKGDRAYKYRRYTEKKIMFHMSLVLNTGKGEIKQVQFNKIINQRISSSDNEMRVNVIGIDRGEKNLLYYSVVKQNGEIIEQASLNEINGVNYRDKLIEREKERLKNRQSWKPVVKIKDLKKGYISHVIHKICQLIEKYSAIVVLEDLNMRFKQIRGGIERSVYQQFEKALIDKLGYLVFKDNRDLRAPGGVLNGYQLSAPFVSFEKMRKQTGILFYTQAEYTSKTDPITGFRKNVYISNSASLDKIKEAVKKFDAIGWDGKEQSYFFKYNPYNLADEKYKNSTVSKEWAIFASAPRIRRQKGEDGYWKYDRVKVNEEFEKLLKVWNFVNPKATDIKQEIIKKIKAGDLQGEKELDGRLRNFWHSFIYLFNLVLELRNSFSLQIKIKAGEVIAVDEGVDFIASPVKPFFTTPNPYIPSNLCWLAVENADANGAYNIARKGVMILKKIREHAKKDPEFKKLPNLFISNAEWDEAARDWGKYAGTTALNLDH

SEQ ID NO: 13 - protein, 1260 aa, Porphyromonas crevioricanis
MDSLKDFTNLYPVSKTLRFELKPVGKTLENIEKAGILKEDEHRAESYRRVKKIIDTYHKVFIDSSLENMAKMGIENEIKAMLQSFCELYKKDHRTEGEDKALDKIRAVLRGLIVGAFTGVCGRRENTVQNEKYESLFKEKLIKEILPDFVLSTEAESLPFSVEEATRSLKEFDSFTSYFAGFYENRKNIYSTKPQSTAIAYRLIHENLPKFIDNILVFQKIKEPIAKELEHIRADFSAGGYIKKDERLEDIFSLNYYIHVLSQAGIEKYNALIGKIVTEGDGEMKGLNEHINLYNQQRGREDRLPLFRPLYKQILSDREQLSYLPESFEKDEELLRALKEFYDHIAEDILGRTQQLMTSISEYDLSRIYVRNDSQLTDISKKMLGDWNAIYMARERAYDHEQAPKRITAKYERDRIKALKGEESISLANLNSCIAFLDNVRDCRVDTYLSTLGQKEGPHGLSNLVENVFASYHEAEQLLSFPYPEENNLIQDKDNVVLIKNLLDNISDLQRFLKPLWGMGDEPDKDERFYGEYNYIRGALDQVIPLYNKVRNYLTRKPYSTRKVKLNFGNSQLLSGWDRNKEKDNSCVILRKGQNFYLAIMNNRHKRSFENKMLPEYKEGEPYFEKMDYKFLPDPNKMLPKVFLSKKGIEIYKPSPKLLEQYGHGTHKKGDTFSMDDLHELIDFFKHSIEAHEDWKQFGFKFSDTATYENVSSFYREVEDQGYKLSFRKVSESYVYSLIDQGKLYLFQIYNKDFSPCSKGTPNLHTLYWRMLFDERNLADVIYKLDGKAEIFFREKSLKNDHPTHPAGKPIKKKSRQKKGEESLFEYDLVKDRRYTMDKFQFHVPITMNFKCSAGSKVNDMVNAHIREAKDMHVIGIDRGERNLLYICVIDSRGTILDQISLNTINDIDYHDLLESRDKDRQQEHRNWQTIEGIKELKQGYLSQAVHRIAELMVAYKAVVALEDLNMGFKRGRQKVESSVYQQFEKQLIDKLNYLVDKKKRPEDIGGLLRAYQFTAPFKSFKEMGKQNGFLFYIPAWNTSNIDPTTGFVNLFHVQYENVDKAKSFFQKFDSISYNPKKDWFEFAFDYKNFTKKAEGSRSMWILCTHGSRIKNFRNSQKNGQWDSEEFALTEAFKSLFVRYEIDYTADLKTAIVDEKQKDFFVDLLKLFKLTVQMRNSWKEKDLDYLISPVAGADGRFFDTREGNKSLPKDADANGAYNIALKGLWALRQIRQTSEGGKLKLAISNKEWLQFVQERSYEKD

SEQ ID NO: 14 - protein, 1324 aa, Prevotella disiens
MENYQEFTNLFQLNKTLRFELKPIGKTCELLEEGKIFASGSFLEKDKVRADNVSYVKKEIDKKHKIFIEETLSSFSISNDLLKQYFDCYNELKAFKKDCKSDEEEVKKTALRNKCTSIQRAMREAISQAFLKSPQKKLLAIKNLIENVFKADENVQHFSEFTSYFSGFETNRENFYSDEEKSTSIAYRLVHDNLPIFIKNIYIFEKLKEQFDAKTLSEIFENYKLYVAGSSLDEVFSLEYFNNTLTQKGIDNYNAVIGKIVKEDKQEIQGLNEHINLYNQKHKDRRLPFFISLKKQILSDREALSWLPDMFKNDSEVIDALKGFYIEDGFENNVLTPLATLLSSLDKYNLNGIFIRNNEALSSLSQNVYRNFSIDEAIDAQNAELQTFNNYELIANALRAKIKKETKQGRKSFEKYEEYIDKKVKAIDSLSIQEINELVENYVSEFNSNSGNMPRKVEDYFSLMRKGDFGSNDLIENIKTKLSAAEKLLGTKYQETAKDIFKKDENSKLIKELLDATKQFQHFIKPLLGTGEEADRDLVFYGDFLPLYEKFEELTLLYNKVRNRLTQKPYSKDKIRLCFNKPKLMTGWVDSKTEKSDNGTQYGGYLFRKKNEIGEYDYFLGISSKAQLFRKNEAVIGDYERLDYYQPKANTIYGSAYEGENSYKEDKKRLNKVIIAYIEQIKQTNIKKSIIESISKYPNISDDDKVTPSSLLEKIKKVSIDSYNGILSFKSFQSVNKEVIDNLLKTISPLKNKAEFLDLINKDYQIFTEVQAVIDEICKQKTFIYFPISNVELEKEMGDKDKPLCLFQISNKDLSFAKTFSANLRKKRGAENLHTMLFKALMEGNQDNLDLGSGAIFYRAKSLDGNKPTHPANEAIKCRNVANKDKVSLFTYDIYKNRRYMENKFLFHLSIVQNYKAANDSAQLNSSATEYIRKADDLHIIGIDRGERNLLYYSVIDMKGNIVEQDSLNIIRNNDLETDYHDLLDKREKERKANRQNWEAVEGIKDLKKGYLSQAVHQIAQLMLKYNAIIALEDLGQMFVTRGQKIEKAVYQQFEKSLVDKLSYLVDKKRPYNELGGILKAYQLASSITKNNSDKQNGFLFYVPAWNTSKIDPVTGFTDLLRPKAMTIKEAQDFFGAFDNISYNDKGYFEFETNYDKFKIRMKSAQTRWTICTFGNRIKRKKDKNYWNYEEVELTEEFKKLFKDSNIDYENCNLKEEIQNKDNRKFFDDLIKLLQLTLQMRNSDDKGNDYIISPVANAEGQFFDSRNGDKKLPLDADANGAYNIARKGLWNIRQIKQTKNKDDLNLSISSTEWLDFVREKPYLK

SEQ ID NO: 15 - protein, 1484 aa, Unknown
  Peregrinibacteria bacterium
  misc_feature (1073)..(1073): Xaa can be any naturally occurring amino acid
MSNFFKNFTNLYELSKTLRFELKPVGDTLTNMKDHLEYDEKLQTFLKDQNIDDAYQALKPQFDEIHEEFITDSLESKKAKEIDFSEYLDLFQEKKELNDSEKKLRNKIGETFNKAGEKWKKEKYPQYEWKKGSKIANGADILSCQDMLQFIKYKNPEDEKIKNYIDDTLKGFFTYFGGFNQNRANYYETKKEASTAVATRIVHENLPKFCDNVIQFKHIIKRKKDGTVEKTERKTEYLNAYQYLKNNNKITQIKDAETEKMIESTPIAEKIFDVYYFSSCLSQKQIEEYNRIIGHYNLLINLYNQAKRSEGKHLSANEKKYKDLPKFKTLYKQIGCGKKKDLFYTIKCDTEEEANKSRNEGKESHSVEEIINKAQEAINKYFKSNNDCENINTVPDFINYILTKENYEGVYWSKAAMNTISDKYFANYHDLQDRLKEAKVFQKADKKSEDDIKIPEAIELSGLFGVLDSLADWQTTLFKSSILSNEKLKIITDSQTPSEALLKMIFNDIEKNMESFLKETNDIITLKKYKGNKEGTEKIKQWFDYTLAINRMLKYFLVKENKIKGNSLDTNISEALKTLIYSDDAEWFKWYDALRNYLTQKPQDEAKENKLKLNFDNPSLAGGWDVNKECSNFCVILKDKNEKKYLAMIKKGENTLFQKEWTEGRGKNLTKKSNPLFEINNCEILSKMEYDFWADVSKMIPKCSTQLKAVVNHFKQSDNEFIFPIGYKVTSGEKFREECKISKQDFELNNKVFNKNELSVTAMRYDLSSTQEKQYIKAFQKEYWELLFKQEKRDTKLTNNEIFNEWINFCNKKYSELLSWERKYKDALTNWINFCKYFLSKYPKTTLFNYSFKESENYNSLDEFYRDVDICSYKLNINTTINKSILDRLVEEGKLYLFEIKNQDSNDGKSIGHKNNLHTIYWNAIFENFDNRPKLNGEAEIFYRKAISKDKLGIVKGKKTKNGTWIIKNYRFSKEKFILHVPITLNFCSNNEYVNDIVNTKFYNFSNLHFLGIDRGEKHLAYYSLVNKNGEIVDQGTLNLPFTDKDGNQRSIKKEKYFYNKQEDKWEAKEVDXWNYNDLLDAMASNRDMARKNWQRIGTIKEAKNGYVSLVIRKIADLAVNNERPAFIVLEDLNTGFKRSRQKIDKSVYQKFELALAKKLNFLVDKNAKRDEIGSPTKALQLTPPVNNYGDIENKKQAGIMLYTRANYTSQTDPATGWRKTIYLKAGPEETTYKKDGKIKNKSVKDQIIETFTDIGFDGKDYYFEYDKGEFVDEKTGEIKPKKWRLYSGENGKSLDRFRGEREKDKYEWKIDKIDIVKILDDLFVNFDKNISLLKQLKEGVELTRNNEHGTGESLRFAINLIQQIRNTGNNERDNDFILSPVRDENGKHFDSREYWDKETKGEKISMPSSGDANGAFNIARKGIIMNAHILANSDSKDLSLFVSDEEWDLHLNNKTEWKKQLNIFSSRKAMAKRKKKRPAATKK

SEQ ID NO: 16 - protein, 1245 aa, Porphyromonas macacae
MKTQHFFEDFTSLYSLSKTIRFELKPIGKTLENIKKNGLIRRDEQRLDDYEKLKKVIDEYHEDFIANILSSFSFSEEILQSYIQNLSISEARAKIEKTMRDTLAKAFSEDERYKSIFKKELVKKDIPVWCPAYKSLCKKFDNFTTSLVPFHENRKNLYTSNEITASIPYRIVHVNLPKFIQNIEALCELQKKMGADLYLEMMENLRNVWPSFVKTPDDLCNLKTYNHLMVQSSISEYNRFVGGYSTEDGTKHQGINEWINIYRQRNKEMRLPGLVFLHKQILAKVDSSSFISDTLENDDQVFCVLRQFRKLFWNTVSSKEDDAASLKDLFCGLSGYDPEAIYVSDAHLATISKNIFDRWNYISDAIRRKTEVLMPRKKESVERYAEKISKQIKKRQSYSLAELDDLLAHYSEESLPAGFSLLSYFTSLGGQKYLVSDGEVILYEEGSNIWDEVLIAFRDLQVILDKDFTEKKLGKDEEAVSVIKKALDSALRLRKFFDLLSGTGAEIRRDSSFYALYTDRMDKLKGLLKMYDKVRNYLTKKPYSIEKFKLHFDNPSLLSGWDKNKELNNLSVIFRQNGYYYLGIMTPKGKNLFKTLPKLGAEEMFYEKMEYKQIAEPMLMLPKVFFPKKTKPAFAPDQSVVDIYNKKTFKTGQKGFNKKDLYRLIDFYKEALTVHEWKLFNFSFSPTEQYRNIGEFFDEVREQAYKVSMVNVPASYIDEAVENGKLYLFQIYNKDFSPYSKGIPNLHTLYWKALFSEQNQSRVYKLCGGGELFYRKASLHMQDTTVHPKGISIHKKNLNKKGETSLFNYDLVKDKRFTEDKFFFHVPISINYKNKKITNVNQMVRDYIAQNDDLQHGIDRGERNLLYISRIDTRGNLLEQFSLNVIESDKGDLRTDYQKILGDREQERLRRRQEWKSIESIKDLKDGYMSQVVHKICNMVVEHKAIVVLENLNLSFMKGRKKVEKSVYEKFERMLVDKLNYLVVDKKNLSNEPGGLYAAYQLTNPLFSFEELHRYPQSGILFFVDPWNTSLTDPSTGFVNLLGRINYTNVGDARKFFDRFNAIRYDGKGNILFDLDLSRFDVRVETQRKLWTLTTFGSRIAKSKKSGKWMVERIENLSLCFLELFEQFNIGYRVEKDLKKAILSQDRKEFYVRLIYLFNLMMQIRNSDGEEDYILSPALNEKNLQFDSRLIEAKDLPVDADANGAYNVARKGLMVVQRIKRGDHESIHRIGRAQWLRYVQEGIVE

SEQ ID NO: 17 - protein, 1250 aa, Smithella sp.
MQTLFENFTNQYPVSKTLRFELIPQGKTKDFIEQKGLLKKDEDRAEKYKKVKNIIDEYHKDFIEKSLNGLKLDGLEKYKTLYLKQEKDDKDKKAFDKEKENLRKQIANAFRNNEKFKTLFAKELIKNDLMSFACEEDKKNVKEFEAFTTYFTGFHQNRANMYVADEKRTAIASRLIHENLPKFIDNIKIFEKMKKEAPELLSPFNQTLKDMKDVIKGTTLEEIFSLDYFNKTLTQSGIDIYNSVIGGRTPEEGKTKIKGLNEYINTDFNQKQTDKKKRQPKFKQLYKQILSDRQSLSFIAEAFKNDTEILEAIEKFYVNELLHFSNEGKSTNVLDAIKNAVSNLESFNLTKMYFRSGASLTDVSRKVFGEWSIINRALDNYYATTYPIKPREKSEKYEERKEKWLKQDFNVSLIQTAIDEYDNETVKGKNSGKVIADYFAKFCDDKETDLIQKVNEGYIAVKDLLNTPCPENEKLGSNKDQVKQIKAFMDSIMDIMHFVRPLSLKDTDKEKDETFYSLFTPLYDHLTQTIALYNKVRNYLTQKPYSTEKIKLNFENSTLLGGWDLNKETDNTAIILRKDNLYYLGIMDKRHNRIFRNVPKADKKDFCYEKMVYKLLPGANKMLPKVFFSQSRIQEFTPSAKLLENYANETHKKGDNFNLNHCHKLIDFFKDSINKHEDWKNFDFRFSATSTYADLSGFYHEVEHQGYKISFQSVADSFIDDLVNEGKLYLFQIYNKDFSPFSKGKPNLHTLYWKMLFDENNLKDVVYKLNGEAEVFYRKKSIAEKNTTIHKANESIINKNPDNPKATSTFNYDIVKDKRYTIDKFQFHIPITMNFKAEGIFNMNQRVNQFLKANPDINIIGIDRGERHLLYYALINQKGKILKQDTLNVIANEKQKVDYHNLLDKKEGDRATARQEWGVIETIKELKEGYLSQVIHKLTDLMIENNAIIVMEDLNFGFKRGRQKVEKQVYQKFEKMLIDKLNYLVDKNKKANELGGLLNAFQLANKFESFQKMGKQNGFIFYVPAWNTSKTDPATGFIDFLKPRYENLNQAKDFFEKFDSIRLNSKADYFEFAFDFKNFTEKADGGRTKWTVCTTNEDRYQWNRALNNNRGSQEKYDITAELKSLFDGKVDYKSGKDLKQQIASQESADFFKALMKNLSITLSLRHNNGEKGDNEQDYILSPVADSKGRFFDSRKADDDMPKNADANGAYHIALKGLWCLEQISKTDDLKKVKLAISNKEWLEFVQTLKG

SEQ ID NO: 18 - DNA, 3987 bp, Artificial sequence
  Synthetic polynucleotide
atggccgggagcaagaagcgccggataaagcaggacacgcagttcgagggcttcaccaacctgtaccaagtctccaagacgctccggttcgagcttatcccgcaagggaagaccctgaaacacatccaggaacaaggtttcatcgaggaggacaaggcccgcaacgaccactacaaggagctcaagcccataatcgatcggatctacaagacgtacgccgaccagtgcctccaactggtgcagctcgactgggagaacctgagcgccgccattgacagctaccgcaaggaaaagacggaggagacgcgcaacgcccttattgaggagcaagccacctaccgcaacgccatccacgactacttcatcgggcgcaccgacaacctgacggacgcgatcaacaagcgccacgcggaaatctacaagggccttttcaaggccgagctcttcaacgggaaggtcctaaaacagctcgggactgtcacgacaaccgagcatgagaacgccctccttcgcagcttcgacaagttcaccacatacttctcgggcttctaccggaaccgcaagaacgttttcagcgccgaggacatctccaccgccatcccgcacaggatcgtccaggacaacttccccaagttcaaggagaactgccacatcttcacgcgcctgattacagccgtaccttcacttcgtgagcacttcgagaacgtcaaaaaggccatcgggatcttcgtctccacgtccatcgaggaggtattctctttcccgttctataaccagctcctgacccagacgcagatcgacctctacaaccagctactgggcggcatcagccgggaggccgggaccgagaaaataaagggcctcaacgaagttctcaacctggccatccagaagaacgacgagaccgcgcatatcatcgcatccctgccgcatcgcttcattcctttgttcaagcagatattgagcgaccggaacaccctctcgttcatcctcgaagaattcaagagcgacgaggaggtcattcagtctttctgcaagtacaagacgctcctacggaatgagaatgtgctggagaccgcggaggcactcttcaatgagctgaactccattgacctgacccacatcttcattagccacaagaaactggagacgatctccagcgccctgtgcgaccactgggacactctccgcaacgccctctacgaacgccggatctccgaacttaccggcaagataactaagtcggctaaggagaaggtgcaacggagcctcaagcacgaggacatcaaccttcaggaaatcatctcagccgcgggcaaggagctgagcgaggcgtttaagcagaaaacatcggagatactgagccacgcgcacgcggccctggatcaaccgctgccgacgactctcaagaagcaagaggagaaggaaatccttaagtcccagctcgactcgctgctcggcctctatcacttgctcgactggttcgcggttgatgagtccaacgaggtggacccggagttctccgcgcgcctcacgggtattaagctggagatggagccaagcttaagcttctacaacaaggcccgcaactacgcgaccaaaaaaccgtactcagtcgagaaattcaagctgaatttccagatgcctacattggcgagggggtgggacgtgaaccgcgagaagaacaatggagccatcctgttcgtcaaaaatgggttgtactacctgggcatcatgcccaagcagaagggccgttacaaggccctgtcattcgagcctaccgagaagacctcggagggcttcgacaagatgtactacgactatttcccggacgccgccaagatgatcccgaagtgctccacgcagctcaaagccgtcacggcccacttccagacgcataccacgccgatacttctgagcaacaacttcattgagccgctagagatcacgaaggagatatacgacctaaacaaccccgaaaaggagcccaagaagttccagacagcctacgctaagaagacaggtgatcagaagggatatagggaggcactctgcaagtggatcgacttcacgcgcgacttcctgtcgaaatatacaaagacgaccagcattgacctaagttctctccgcccatcctcccagtacaaggatctgggcgagtattatgcggagctgaacccattgctgtaccacatcagcttccagaggatcgccgagaaggagattatggacgcggtggagacggggaaactatacctgttccaaatatataacaaggacttcgctaaagggcaccacgggaagcccaacctgcacacactctactggacgggcttgttttcgccagaaaatttggccaagacttcgatcaagctcaacggccaggcggagttgttttaccgtcccaagtctcgcatgaagcgcatggcgcatcgcctcggagagaaaatgcttaacaagaagctcaaggatcagaagacgcccatacctgatacgttgtaccaggaattgtacgactacgtgaaccaccgcctatcgcacgacctctcagacgaggcccgcgccctcctcccaaacgtgattactaaggaggtttcccatgaaataatcaaggaccgacggttcaccagcgacaaattttttttccacgtgcctatcacgctcaattaccaggcggccaactccccatcgaagttcaaccagcgcgtgaacgcctaccttaaggagcacccggagaccccaatcatcgggatcgaccgtggcgagcggaacctgatctatattacggtgatcgatagcaccgggaagatcctggagcagcgctccctgaacacaatccagcagtttgactaccagaagaaactcgacaaccgggagaaggagcgcgtcgcagcccggcaagcatggagtgtggtcggcaccataaaggacctgaaacagggttacctaagtcaagttatccacgagatcgttgacctgatgatacactatcaagccgtagtcgtgctggagaacctcaacttcgggtttaagtccaagcgcaccggcatcgcggagaaggcggtgtaccagcagttcgagaagatgctgatcgacaagctgaactgcctggtgctcaaggactaccctgcggagaaggtcggcggggtcttgaacccgtaccagctaaccgaccagttcacgagcttcgccaaaatgggcacgcagtccggattcttgttttatgtcccggctccatatacaagtaagatcgacccgctgacagggtttgttgacccattcgtgtggaagaccatcaagaaccacgagagcaggaaacacttcttagagggcttcgacttcctgcattacgacgttaagacaggcgacttcatcctgcacttcaagatgaaccgcaacctgtcgttccagaggggcctgcccggcttcatgcccgcctgggatatcgtctttgagaagaatgagacgcagttcgacgcgaaggggacgccgttcatcgctggaaagcggatcgtgccggtcatcgagaaccaccgcttcacgggtcgctaccgagatttataccccgccaacgaactaattgcgctgctggaggagaaggggatcgtgttccgagatggcagcaacattctcccgaagctgctggagaacgacgactcgcacgctattgacacgatggtcgccctcatacggagcgtgcttcagatgcggaacagtaacgctgccacgggcgaggactacattaactcccccgtccgcgacctcaacggggtctgcttcgatagccgcttccagaacccggagtggcctatggatgcggacgcgaacggggcctaccacatcgccctcaagggccaactcctgctcaaccacttgaaggaaagcaaagacctcaaattgcagaatggcatcagtaaccaggactggctcgcgtacatccaggaactgagaaacgggtccaagaagcggcgtatcaagcaagattga

SEQ ID NO: 19 - DNA, 3987 bp, Artificial sequence
  Synthetic polynucleotide
atggcgggaagcaaaaagcgccggattaagcaagacacgcagttcgagggcttcacgaacctctaccaagtcagcaagaccctccggttcgagctgataccacagggaaagacgctcaagcacatccaggaacagggcttcatcgaggaggacaaggcgcgcaacgaccactacaaggagttgaaaccgatcatcgaccgcatctacaagacgtacgccgaccagtgcctccagctcgtgcagctcgactgggagaacctctccgccgccattgactcgtaccggaaggagaagactgaggagacccgcaacgccctgatcgaggagcaagcaacctaccggaacgccatccacgactacttcatcggccgcaccgacaacctcaccgacgcgatcaacaagcggcacgcggagatatacaaagggctgttcaaggcggagctgttcaacggcaaggtgctcaagcagctagggacggtgaccacgaccgagcacgagaacgcgctcctccgcagcttcgacaagttcaccacctacttcagcggcttctaccggaaccgcaagaatgtgttcagcgcggaggacatcagcacggccatcccgcaccgcatcgtccaggacaacttcccgaagttcaaggagaactgccacatcttcacccgcctgataaccgccgtcccctccctgcgggagcacttcgagaacgtcaaaaaggcaattgggatcttcgtctcgaccagcattgaggaggtgttcagcttccccttctacaaccagctcctcacccagacgcagatcgacctgtacaatcagttgctcggcgggataagccgcgaggcgggaaccgaaaaaatcaaggggctgaacgaagtgttgaacctcgccatccagaagaacgacgagaccgcgcacatcatcgcctccctgccccaccggttcatcccgctgttcaagcagatcctctctgaccggaacaccctgtccttcattcttgaggagttcaagtcggacgaggaggtcatccagagcttctgcaagtacaagacgctgctacggaacgagaacgtgctggagacggcggaggcactgttcaacgagctaaacagcatcgacctcacgcacatcttcatcagtcacaagaaactggagaccatctcctccgcgctgtgcgaccactgggacacgctcaggaacgcgctctacgagcgccgaatcagtgagctgacgggcaagatcacgaagtccgcgaaggagaaggtgcagcggtccctcaagcacgaggacatcaacctccaggagatcatctcagcggctgggaaagagctgtccgaggcgttcaagcagaaaacgagcgaaatcctgtcccacgcgcacgcggccctggatcagcctctgccgacgaccctcaagaaacaagaagaaaaggaaatcctcaagtcgcagctcgactcgctgctgggcctgtaccatctcctcgactggttcgccgtggacgagagcaacgaggtggaccccgagttctccgcgcggcttacggggatcaagctggagatggagcccagcctgtccttctacaacaaggcgcgcaactacgccaccaagaagccctacagcgtggagaagttcaagctcaacttccagatgcccactctcgcacgtgggtgggacgtcaaccgcgaaaaaaataatggggcgatcctgttcgtcaagaacggcctgtactacttgggcatcatgccgaaacagaagggccgctacaaggccctgagcttcgaaccgaccgagaaaacgagcgaggggttcgacaagatgtactacgactacttccccgacgccgcgaagatgattccaaagtgctccacgcagcttaaggccgtgacggcccacttccagacgcacacgaccccgatcctcctcagcaacaacttcatcgagcccctggagatcacgaaggagatatacgacctgaacaacccggagaaggagcccaagaaattccagaccgcctacgccaagaagacaggcgaccaaaagggttacagggaggccctctgcaagtggatcgacttcactagggacttcctgtccaagtacaccaagactacctctatcgacctgtccagcctccgcccgtcgtcccagtacaaagatttgggcgagtattacgcggagctgaacccactgctctaccacatcagcttccagcgcatcgcggagaaggagatcatggacgcagtggagacgggcaagctatacctatttcagatatacaacaaagacttcgctaagggacaccacggcaagcctaacctgcacaccctctactggacggggctcttcagcccggagaacctcgccaagacctcgatcaagctcaacggccaggccgagctgttctaccggcccaagtcccgcatgaagcggatggcccaccggctcggggagaaaatgctcaacaagaaattgaaggaccaaaaaacgccgatacccgacaccctataccaggagctgtacgactatgtgaaccaccgcctgagccacgacctcagcgacgaggcgcgggccctcctgccgaacgtcatcacaaaggaggtcagccacgagatcatcaaggaccggcgcttcacctccgacaagtttttctttcacgtgcccatcacgctcaactaccaggccgccaactcgccgtccaagttcaaccagcgcgtgaacgcctacctcaaggagcaccccgagaccccgatcatcgggattgaccgaggggagcggaacctcatctacatcaccgtcatcgacagcaccgggaagatccttgaacagcggtcgctcaacaccatccagcagttcgactaccagaagaaactcgacaaccgggagaaggagagagtggcggcccgccaggcttggtccgtcgtcgggacgattaaggacttgaaacaaggttacctgtcgcaagtgatccacgagatcgttgacctgatgatccactaccaagccgtcgtggtcctggagaacctcaacttcggcttcaagagcaaacgaaccggcatcgcggagaaggccgtgtaccagcagttcgaaaaaatgctgatcgacaagctgaactgcctcgtgctcaaggactaccccgctgagaaggtcggcggggtgctgaacccgtaccagctcactgaccagttcaccagcttcgcaaagatgggcacccagtccggcttcctgttctacgtgcctgcgccatacacctcgaagatcgacccgctcaccgggttcgtggaccccttcgtctggaagaccatcaagaaccacgagagccgcaagcacttcctggagggcttcgacttcctccactacgacgtcaagaccggggacttcatcctgcacttcaagatgaaccgcaacctcagtttccagcgcggcctgccggggttcatgcccgcttgggatatagtcttcgagaagaatgagacgcagttcgacgcgaagggcaccccgttcatcgccgggaagcgcatcgtgccggtcatcgagaaccaccggttcaccgggcgctaccgcgacctatacccggcgaacgagttgatcgccctcctggaggagaagggcatcgtgttccgcgacggctccaacatcctcccgaagctgctcgaaaacgacgactcccacgccatcgacacgatggtcgcgctgatccggtcggtgctccagatgcggaactccaacgccgcgacgggcgaggactacatcaacagtccggtccgcgatctgaacggcgtctgcttcgactcccggttccagaaccccgagtggccgatggacgcggacgcgaacggcgcataccacatcgccctaaaagggcaattgctgctcaaccacctcaaggaatccaaagacctaaagctccagaacggcatctccaaccaggactggctggcgtacatccaggaactgcggaacgggagcaaaaaacgtcggatcaagcaagattga

SEQ ID NO: 20 - DNA, 3987 bp, Artificial sequence
  Synthetic polynucleotide
atggcgggctccaagaaacgccggattaagcaagatacccagttcgaggggttcacgaacctctaccaagtgagcaagaccctccgattcgaactgattcctcaggggaagaccctcaagcacatccaggagcaagggttcatcgaggaggacaaggcgcggaacgaccactacaaggaactcaaacccatcatcgaccgcatctacaagacctacgccgatcagtgcctccagctcgtgcagttggactgggagaacctcagcgcggccattgactcctaccggaaggagaaaacggaggagacgcgcaacgcgctcatcgaggaacaggcaacctatcgcaacgccatccacgactacttcatcgggaggactgacaacctcactgacgcgattaacaagcgccacgcggagatatacaagggactcttcaaagcggagctgtttaacggcaaggttctcaagcaactcggcactgtgaccacgaccgagcatgagaacgccctgctccgctccttcgacaagttcaccacctacttctccgggttctaccgcaaccgcaagaatgtcttcagcgcggaggacatcagcacggccattccacatcgaatcgtccaagataacttcccgaagttcaaggagaactgccacatcttcacccgactcattactgctgtaccgtcgttacgcgaacacttcgagaacgtcaagaaggcaattggaatcttcgtctctacgtcaatagaggaggtgttcagcttccctttctacaaccagctccttacgcagacccagatagacctgtacaatcagctcctcggtgggatcagccgggaggcggggactgagaagattaaagggctcaacgaggtcttgaacctggccatccaaaaaaacgatgagacggcgcacatcatcgcctcgctgccccaccggttcatcccgctgttcaagcagatcctcagtgacaggaacaccttgagctttatcctagaggagttcaagagcgacgaggaggtgatccagagcttctgcaagtacaaaaccctgctgaggaacgagaacgtcctggagacggcggaggcgctgttcaacgagctgaactctatcgacttaactcacatattcatctcgcacaagaagctggagactattagctctgcactctgcgaccactgggacaccctccgcaacgcgctctacgagcgccgcatctcggagctgaccgggaagatcaccaaatccgcgaaggaaaaggtccagcgttccctcaaacacgaggatattaacttacaggagattatctcagcggctgggaaggagttgtcagaggcgttcaagcagaaaacttccgagatcctgagccacgcgcacgcagcgctcgaccagcctctgcccaccaccctcaaaaagcaggaagaaaaagagatcctcaagagccagttggactccctgctggggctctatcaccttctcgactggttcgccgtcgatgagtcgaacgaggtggaccccgagttctccgcccggctgaccggcatcaagctagagatggagccgtccctcagcttctacaataaggcccgcaactacgcgaccaaaaaaccctacagcgtggagaagttcaagctgaacttccagatgccgaccttagcacgcggttgggacgtaaacagggagaagaacaatggagccatcctgttcgtcaagaacgggctttactacctcgggataatgcccaagcagaagggccgctacaaggccctttccttcgagccgacggagaaaacctccgaggggttcgacaagatgtactacgactacttccccgacgccgccaagatgatcccgaagtgctcaacgcagctaaaagccgtgaccgcccacttccagacccacacgacgccgatcctgctgagcaacaacttcatcgagccccttgagatcactaaggagatatacgacctgaacaaccccgagaaggagcccaagaagtttcaaaccgcctacgccaaaaaaactggcgaccaaaagggctacagggaggcgctgtgtaagtggatcgacttcacacgcgacttcctttcgaagtatacgaagacaacctctattgacctgagcagcctgcgtcctagctcccagtacaaagatttgggcgagtactacgcggagcttaatccactactctaccacatctcattccagcgcatcgctgagaaggaaatcatggacgcggtggagacaggcaaactgtacctcttccagatatacaacaaagacttcgctaaggggcaccacgggaagcccaaccttcatacgctctactggacgggcctattcagccccgaaaatctggccaagacctccatcaagctgaacggccaagcggagctgttctacagacccaagagccggatgaagcggatggcccacaggctcggcgagaaaatgcttaacaaaaagttgaaggaccagaaaacccctatccccgacaccctctaccaggaactgtacgactacgtgaaccacaggctctcgcacgacctttccgacgaggcccgtgccctactcccgaacgtcattaccaaagaggtttcgcacgagatcatcaaggaccggcggttcacgagcgacaagtttttctttcacgtccccatcacccttaactaccaggcggccaactccccatccaagttcaaccagcgtgtgaatgcctacctcaaggagcacccagagaccccgatcattgggatcgaccggggcgagcggaacctgatctacatcaccgtcatcgactcgacgggcaagattcttgagcagagatcgttgaataccatacagcagttcgactaccagaagaaactcgacaaccgcgagaaggagcgcgtggcggcccgccaggcgtggtccgtcgttgggacgattaaggacttgaaacaaggttatctgtcccaagtcatccacgagatcgttgatctgatgatccactatcaggcagtggtggtgctggagaatctcaacttcggcttcaagagtaagcggacgggaatcgccgagaaggccgtgtaccagcagttcgagaagatgctgatcgacaagctcaactgccttgtgctgaaagactacccggccgagaaggtcggcggcgtcctcaacccgtaccaacttaccgaccagttcacctccttcgccaagatgggcactcagtccgggttcttgttctacgtccccgcaccttacacctctaagatcgaccctctgactggcttcgtagatccattcgtgtggaagaccattaagaaccacgagagccgcaagcacttcctggagggcttcgacttcctgcactacgacgtgaagaccggggacttcatccttcacttcaagatgaaccggaacctcagcttccagcggggcctgccggggttcatgcccgcctgggacatcgtgttcgagaagaacgagacccagttcgacgcgaagggcacgcccttcatcgccgggaagcgtatcgtgccggtgatcgagaaccatcgtttcacgggtcgctaccgtgacctctacccggcgaacgagcttatcgcactcctggaggagaagggcatcgtcttccgggacggctccaacatcctcccgaaactgctggaaaacgacgactctcacgccatcgacacgatggtggccctcatccggtccgtgctccaaatgcggaacagcaacgccgccaccggtgaggactacatcaacagcccggtccgggatctgaacggggtgtgcttcgattcgcggttccagaatcctgagtggccgatggacgcggatgcaaacggggcgtaccacatcgcgctcaagggccagttacttctgaaccaccttaaggagtctaaagatttgaaactccagaacgggatctcgaaccaggactggctggcctacatccaagagttgcggaacggcagcaagaagcggcggattaagcaagattag

SEQ ID NO: 21 - DNA, 1592 bp, Medicago truncatula
actgttaataatttttaaacgtcagcgcactaaaaaaacgaaaagacggacacgtgaaaataaaaaacacacactagtttatgacgcaatactattttacttatgatttgggtacattagacaaaaccgtgaaagagatgtatcagctatgaaacctgtatacttcaatacagagacttactcatatcggatacgtacgcacgaagtatcatattaattattttaatttttaataaatattttatcggatacttatgtgatactctacatatacacaaggatatttctaagatactttatagatacgtatcctagaaaaacatgaagagtaaaaaagtgagacaatgttgtaaaaattcattataaatgtatatgattcaattttagatatgcatcagtataattgattctcgatgaaacacttaaaattatatttcttgtggaagaacgtagcgagagaggtgattcagttagacaacattaaataaaattaatgttaagttcttttaatgatgtttctctcaatatcacatcatatgaaaatgtaatatgatttataagaaaatttttaaaaaatttattttaataatcacatgtactattttttaaaaattgtatcttttataataatacaataataaagagtaatcagtgttaatttttcttcaaatataagttttattataaatcattgttaacgtatcataagtcattaccgtatcgtatcttaatttttttttaaaaaccgctaattcacgtacccgtattgtattgtacccgcacctgtatcacaatcgatcttagttagaagaattgtctcgaggcggtgcaagacagcatataatagacgtggactctcttataccaaacgttgtcgtatcacaaagggttaggtaacaagtcacagtttgtccacgtgtcacgttttaattggaagaggtgccgttggcgtaatataacagccaatcgatttttgctataaaagcaaatcaggtaaactaaacttcttcattcttttcttccccatcgctacaaaaccggttcctttggaaaagagattcattcaaacctagcacccaattccgtttcaaggtataatctactttctattcttcgattattttattattattagctactatcgtttaatcgatcttttcttttgatccgtcaaatttaaattcaattagggttttgttcttttctttcatctgattgaaatccttctgaattgaaccgtttacttgattttactgtttattgtatgatttaatcctttgtttttcaaagacagtctttagattgtgattaggggttcatataaatttttagatttggatttttgtattgtatgattcaaaaaatacgtcctttaattagattagtacatggatattttttacccgatttattgattgtcagggagaatttgatgagcaagtttttttgatgtctgttgtaaattgaattgattataattgctgatctgctgcttccagttttcataacccatattcttttaaccttgttgtacacacaatgaaaaattggtgattgattcatttgtttttctttgttttggattatacagg

SEQ ID NO: 22 - DNA, 2000 bp, Zea mays
gtcgtgcccctctctagagataaagagcattgcatgtctaaagtataaaaaattaccacatatttttttgtcacacttatttgaagtgtagtttatctatctctatacatatatttaaacttcactctacaaataatatagtctataatactaaaataatattagtgttttagaggatcatataaataaactgctagacatggtctaaaggataattgaatattttgacaatctacagttttatctttttagtgtgcatgtgatctctctgttttttttgcaaatagcttgacctatataatacttcatccattttattagtacatccatttaggatttagggttgatggtttctatagactaatttttagtacatccattttattctttttagtctctaaattttttaaaactaaaactctattttagttttttatttaataatttagatataaaatgaaataaaataaattgactacaaataaaacaaataccctttaagaaataaaaaaactaagcaaacatttttcttgtttcgagtagataatgacaggctgttcaacgccgtcgacgagtctaacggacaccaaccagcgaaccagcagcgtcgcgtcgggccaagcgaagcagacggcacggcatctctgtagctgcctctggacccctctcgagagttccgctccaccgttggacttgctccgctgtcggcatccagaaattgcgtggcggagcggcagacgtgaggcggcacggcaggcggcctcttcctcctctcacggcaccggcagctacgggggattcctttcccaccgctccttcgctttcccttcctcgcccgccgtaataaatagacaccccctccacaccctctttccccaacctcgtgttcgttcggagcgcacacacacgcaaccagatctcccccaaatccagccgtcggcacctccgcttcaaggtacgccgctcatcctccccccccccctctctctaccttctctagatcggcgatccggtccatggttagggcccggtagttctacttctgttcatgtttgtgttagagcaaacatgttcatgttcatgtttgtgatgatgtggtctggttgggcggtcgttctagatcggagtaggatactgtttcaagctacctggtggatttattaattttgtatctgtatgtgtgtgccatacatcttcatagttacgagtttaagatgatggatggaaatatcgatctaggataggtatacatgttgatgcgggttttactgatgcatatacagagatgctttttttctcgcttggttgtgatgatatggtctggttgggcggtcgttctagatcggagtagaatactgtttcaaactacctggtggatttattaaaggataaagggtcgttctagatcggagtagaatactgtttcaaactacctggtggatttattaaaggatctgtatgtatgtgcctacatcttcatagttacgagtttaagatgatggatggaaatatcgatctaggataggtatacatgttgatgcgggttttactgatgcatatacagagatgctttttttcgcttggttgtgatgatgtggtctggttgggcggtcgttctagatcggagtagaatactgtttcaaactacctggtggatttattaattttgtatctttatgtgtgtgccatacatcttcatagttacgagtttaagatgatggatggaaatattgatctaggataggtatacatgttgatgtgggttttactgatgcatatacatgatggcatatgcggcatctattcatatgctctaaccttgagtacctatctattataataaacaagtatgttttataattattttgatcttgatatacttggatgatggcatatgcagcagctatatgtggattttttagccctgccttcatacgctatttatttgcttggtactgtttcttttgtccgatgctcaccctgttgtttggtgatacttc

SEQ ID NO: 23 - protein, 228 aa, Rattus norvegicus
SSETGPVAVDPTLRRRIEPHEFEVFFDPRELRKETCLLYEINWGGRHSIWRHTSQNTNKHVEVNFIEKFTTERYFCPNTRCSITWFLSWSPCGECSRAITEFLSRYPHVTLFIYIARLYHHADPRNRQGLRDLISSGVTIQIMTEQESGYCWRNFVNYSPSNEAHWPRYPHLWVRLYVLELYCIILGLPPCLNILRRKQPQLTFFTIALQSCHYQRLPPHILWATGLK

SEQ ID NO: 24 - protein, 199 aa, Homo sapiens
MEASPASGPRHLMDPHIFTSNFNNGIGRHKTYLCYEVERLDNGTSVKMDQHRGFLHNQAKNLLCGFYGRHAELRFLDLVPSLQLDPAQIYRVTWFISWSPCFSWGCAGEVRAFLQENTHVRLRIFAARIYDYDPLYKEALQMLRDAGAQVSIMTYDEFKHCWDTFVDHQGCPFQPWDGLDEHSQALSGRLRAILQNQGN

SEQ ID NO: 25 - DNA, 621 bp, Petromyzon marinus
acagatgcagagtatgtgagaattcacgaaaagctggacatctataccttcaagaagcagttctttaacaataagaagtctgtgagccataggtgctacgtgctgttcgagctgaagagaaggggtgaaagaagggcatgtttttgggggtatgctgtgaacaagccccagtctggaactgagagaggcattcacgccgaaattttcagcatcagaaaggtggaggaatacctgagggataaccctggacagtttacaattaattggtattctagctggtctccatgcgctgactgtgccgagaagatcctggaatggtacaaccaggagctgagaggaaatggccataccctgaagatttgggcctgcaagctgtactatgaaaagaacgcaagaaatcagatcggactgtggaacctgagggataatggtgtggggctgaacgtgatggtgtccgagcactatcagtgctgtagaaagattttcattcagtcctcacataatcagctgaacgagaatagatggctggaaaagactctgaagagggctgagaagagaaggtccgaactgtcaattatgatccaggtgaagatcctgcacaccactaagtcacctgccgtg

SEQ ID NO: 26 - protein, 160 aa, Artificial sequence
  Synthetic polypeptide
FERNYDPRELRKETYLLYEIKWGKSGKLWRHWCQNNRTQHAEVYFLENIFNARRFNPSTHCSITWYLSWSPCAECSQKIVDFLKEHPNVLEIYVARLYYHEDERNRQGLRDLVNSGVTIRIMDLPDYNYCWKTFVSDQGGDEDYWPGHFAPWIKQYSLKL

SEQ ID NO: 27 - protein, 207 aa, Artificial sequence
  Synthetic polypeptide
TDAEYVRIHEKLDIYTFKKQFSNNKKSVSHRCYVLFELKRRGERRACFWGYAVNKPQSGTERGIHAEIFSIRKVEEYLRDNPGQFTINWYSSWSPCADCAEKILEWYNQELRGNGHTLKIWVCKLYYEKNARNQIGLWNLRDNGVGLNVMVSEHYQCCRKIFIQSSHNQLNENRWLEKTLKRAEKRRSELSIMFQVKILHTTKSPAV

SEQ ID NO: 28 - protein, 228 aa, Artificial sequence
  Synthetic polypeptide
SSKTGPVAVDPTLRRRIEPHEFEVFFDPRELRKETCLLYEINWGGRHSIWRHTSQNTNKHVEVNFIEKFTTERYFCPNTRCSITWFLSWSPCGECSRAITEFLSRYPNVTLFIYIARLYHLANPRNRQGLRDLISSGVTIQIMTEQESGYCWHNFVNYSPSNESHWPRYPHLWVRLYVLELYCIILGLPPCLNILRRKQSQLTSFTIALQSCHYQRLPPHILWATGLK

SEQ ID NO: 29 - protein, 162 aa, Artificial sequence
  Synthetic polypeptide
SFERNYDPRELRKETYLLYEIKWGKSGKLWRHWCQNNRTQHAEVYFLENIFNARRFNPSTHCSITWYLSWSPCAECSQKIVDFLKEHPNVNLEIYVARLYYPENERNRQGLRDLVNSGVTIRIMDLPDYNYCWKTFVSDQGGDEDYWPGHFAPWIKQYSLKL

SEQ ID NO: 30 - protein, 166 aa, Escherichia coli
SEVEFSHEYWMRHALTLAKRAWDEREVPVGAVLVHNNRVIGEGWNRPIGRHDPTAHAEIMALRQGGLVMQNYRLIDATLYVTLEPCVMCAGAMIHSRIGRVVFGARDAKTGAAGSLMDVLHHPGMNHRVEITEGILADECAALLSDFFRMRRQEIKAQKKAQSSTD

SEQ ID NO: 31 - protein, 166 aa, Artificial sequence
  Synthetic polypeptide
SEVEFSHEYWMRHALTLAKRARDEREVPVGAVLVLNNRVIGEGWNRAIGLHDPTAHAEIMALRQGGLVMQNYRLIDATLYVTFEPCVMCAGAMIHSRIGRVVFGVRNAKTGAAGSLMDVLHYPGMNHRVEITEGILADECAALLCYFFRMPRQVFNAQKKAQSSTD

SEQ ID NO: 32 - protein, 166 aa, Artificial sequence
  Synthetic polypeptide
SEVEFSHEYWMRHALTLAKRAWDEREVPVGAVLVLNNRVIGEGWNRSIGLHDPTAHAEIMALRQGGLVMQNYRLIDATLYVTFEPCVMCAGAMIHSRIGRVVFGVRNAKTGAAGSLMDVLHYPGMNHRVEITEGILADECAALLCYFFRMRRQVFNAQKKAQSSTD

SEQ ID NO: 33 - protein, 166 aa, Artificial sequence
  Synthetic polypeptide
SEVEFSHEYWMRHALTLAKRALDEREVPVGAVLVLNNRVIGEGWNRAIGLHDPTAHAEIMALRQGGLVMQNYRLIDATLYVTFEPCVMCAGAMIHSRIGRVVFGVRNAKTGAAGSLMDVLHYPGMNHRVEITEGILADECNALLCYFFRMRRQVFNAQKKAQSSTD

SEQ ID NO: 34 - protein, 166 aa, Artificial sequence
  Synthetic polypeptide
SEVEFSHEYWMRHALTLAKRALDEREVPVGAVLVLNNRVIGEGWNRAIGLHDPTAHAEIMALRQGGLVMQNYRLIDATLYVTFEPCVMCAGAMIHSRIGRVVFGVRNAKTGAAGSLMDVLHYPGMNHRVEITEGILADECNALLCYFFRMPRQVFNAQKKAQSSTD

SEQ ID NO: 35 - protein, 1763 aa, Artificial sequence
  Synthetic polypeptide
SEVEFSHEYWMRHALTLAKRAWDEREVPVGAVLVHNNRVIGEGWNRPIGRHDPTAHAEIMALRQGGLVMQNYRLIDATLYVTLEPCVMCAGAMIHSRIGRVVFGARDAKTGAAGSLMDVLHHPGMNHRVEITEGILADECAALLSDFFRMRRQEIKAQKKAQSSTDSGGSSGGSSGSETPGTSESATPESSGGSSGGSSEVEFSHEYWMRHALTLAKRARDEREVPVGAVLVLNNRVIGEGWNRAIGLHDPTAHAEIMALRQGGLVMQNYRLIDATLYVTFEPCVMCAGAMIHSRIGRVVFGVRNAKTGAAGSLMDVLHYPGMNHRVEITEGILADECAALLCYFFRMPRQVFNAQKKAQSSTDSGGSSGGSSGSETPGTSESATPESSGGSSGGSDKKYSIGLAIGTNSVGWAVITDEYKVPSKKFKVLGNTDRHSIKKNLIGALLFDSGETAEATRLKRTARRRYTRRKNRICYLQEIFSNEMAKVDDSFFHRLEESFLVEEDKKHERHPIFGNIVDEVAYHEKYPTIYHLRKKLVDSTDKADLRLIYLALAHMIKFRGHFLIEGDLNPDNSDVDKLFIQLVQTYNQLFEENPINASGVDAKAILSARLSKSRRLENLIAQLPGEKKNGLFGNLIALSLGLTPNFKSNFDLAEDAKLQLSKDTYDDDLDNLLAQIGDQYADLFLAAKNLSDAILLSDILRVNTEITKAPLSASMIKRYDEHHQDLTLLKALVRQQLPEKYKEIFFDQSKNGYAGYIDGGASQEEFYKFIKPILEKMDGTEELLVKLNREDLLRKQRTFDNGSIPHQIHLGELHAILRRQEDFYPFLKDNREKIEKILTFRIPYYVGPLARGNSRFAWMTRKSEETITPWNFEEVVDKGASAQSFIERMTNFDKNLPNEKVLPKHSLLYEYFTVYNELTKVKYVTEGMRKPAFLSGEQKKAIVDLLFKTNRKVTVKQLKEDYFKKIECFDSVEISGVEDRFNASLGTYHDLLKIIKDKDFLDNEENEDILEDIVLTLTLFEDREMIEERLKTYAHLFDDKVMKQLKRRRYTGWGRLSRKLINGIRDKQSGKTILDFLKSDGFANRNFMQLIHDDSLTFKEDIQKAQVSGQGDSLHEHIANLAGSPAIKKGILQTVKVVDELVKVMGRHKPENIVIEMARENQTTQKGQKNSRERMKRIEEGIKELGSQILKEHPVENTQLQNEKLYLYYLQNGRDMYVDQELDINRLSDYDVDHIVPQSFLKDDSIDNKVLTRSDKNRGKSDNVPSEEVVKKMKNYWRQLLNAKLITQRKFDNLTKAERGGLSELDKAGFIKRQLVETRQITKHVAQILDSRMNTKYDENDKLIREVKVITLKSKLVSDFRKDFQFYKVREINNYHHAHDAYLNAVVGTALIKKYPKLESEFVYGDYKVYDVRKMIAKSEQEIGKATAKYFFYSNIMNFFKTEITLANGEIRKRPLIETNGETGEIVWDKGRDFATVRKVLSMPQVNIVKKTEVQTGGFSKESILPKRNSDKLIARKKDWDPKKYGGFDSPTVAYSVLVVAKVEKGKSKKLKSVKELLGITIMERSSFEKNPIDFLEAKGYKEVKKDLIIKLPKYSLFELENGRKRMLASAGELQKGNELALPSKYVNFLYLASHYEKLKGSPEDNEQKQLFVEQHKHYLDEIIEQISEFSKRVILADANLDKVLSAYNKHRDKPIREQAENIIHLFTLTNLGAPAAFKYFDTTIDRKRYTSTKEVLDATLIHQSITGLYETRIDLSQLGGD

SEQ ID NO: 36 - protein, 1565 aa, Artificial sequence
  Synthetic polypeptide
SEVEFSHEYWMRHALTLAKRARDEREVPVGAVLVLNNRVIGEGWNRAIGLHDPTAHAEIMALRQGGLVMQNYRLIDATLYVTFEPCVMCAGAMIHSRIGRVVFGVRNSKRGAAGSLMNVLNYPGMNHRVEITEGILADECAALLCDFYRMPRQVFNAQKKAQSSINSGGSSGGSSGSETPGTSESATPESSGGSSGGSDKKYSIGLAIGTNSVGWAVITDEYKVPSKKFKVLGNTDRHSIKKNLIGALLFDSGETAEATRLKRTARRRYTRRKNRICYLQEIFSNEMAKVDDSFFHRLEESFLVEEDKKHERHPIFGNIVDEVAYHEKYPTIYHLRKKLVDSTDKADLRLIYLALAHMIKFRGHFLIEGDLNPDNSDVDKLFIQLVQTYNQLFEENPINASGVDAKAILSARLSKSRRLENLIAQLPGEKKNGLFGNLIALSLGLTPNFKSNFDLAEDAKLQLSKDTYDDDLDNLLAQIGDQYADLFLAAKNLSDAILLSDILRVNTEITKAPLSASMIKRYDEHHQDLTLLKALVRQQLPEKYKEIFFDQSKNGYAGYIDGGASQEEFYKFIKPILEKMDGTEELLVKLNREDLLRKQRTFDNGSIPHQIHLGELHAILRRQEDFYPFLKDNREKIEKILTFRIPYYVGPLARGNSRFAWMTRKSEETITPWNFEEVVDKGASAQSFIERMTNFDKNLPNEKVLPKHSLLYEYFTVYNELTKVKYVTEGMRKPAFLSGEQKKAIVDLLFKTNRKVTVKQLKEDYFKKIECFDSVEISGVEDRFNASLGTYHDLLKIIKDKDFLDNEENEDILEDIVLTLTLFEDREMIEERLKTYAHLFDDKVMKQLKRRRYTGWGRLSRKLINGIRDKQSGKTILDFLKSDGFANRNFMQLIHDDSLTFKEDIQKAQVSGQGDSLHEHIANLAGSPAIKKGILQTVKVVDELVKVMGRHKPENIVIEMARENQTTQKGQKNSRERMKRIEEGIKELGSQILKEHPVENTQLQNEKLYLYYLQNGRDMYVDQELDINRLSDYDVDHIVPQSFLKDDSIDNKVLTRSDKNRGKSDNVPSEEVVKKMKNYWRQLLNAKLITQRKFDNLTKAERGGLSELDKAGFIKRQLVETRQITKHVAQILDSRMNTKYDENDKLIREVKVITLKSKLVSDFRKDFQFYKVREINNYHHAHDAYLNAVVGTALIKKYPKLESEFVYGDYKVYDVRKMIAKSEQEIGKATAKYFFYSNIMNFFKTEITLANGEIRKRPLIETNGETGEIVWDKGRDFATVRKVLSMPQVNIVKKTEVQTGGFSKESILPKRNSDKLIARKKDWDPKKYGGFDSPTVAYSVLVVAKVEKGKSKKLKSVKELLGITIMERSSFEKNPIDFLEAKGYKEVKKDLIIKLPKYSLFELENGRKRMLASAGELQKGNELALPSKYVNFLYLASHYEKLKGSPEDNEQKQLFVEQHKHYLDEIIEQISEFSKRVILADANLDKVLSAYNKHRDKPIREQAENIIHLFTLTNLGAPAAFKYFDTTIDRKRYTSTKEVLDATLIHQSITGLYETRIDLSQLGGD

SEQ ID NO: 37 - protein, 1565 aa, Artificial sequence
  Synthetic polypeptide
SEVEFSHEYWMRHALTLAKRARDEREVPVGAVLVLNNRVIGEGWNRAIGLHDPTAHAEIMALRQGGLVMQNYRLYDATLYSTFEPCVMCAGAMIHSRIGRVVFGVRNAKTGAAGSLMDVLHHPGMNHRVEITEGILADECAALLCRFFRMPRRVFNAQKKAQSSTDSGGSSGGSSGSETPGTSESATPESSGGSSGGSDKKYSIGLAIGTNSVGWAVITDEYKVPSKKFKVLGNTDRHSIKKNLIGALLFDSGETAEATRLKRTARRRYTRRKNRICYLQEIFSNEMAKVDDSFFHRLEESFLVEEDKKHERHPIFGNIVDEVAYHEKYPTIYHLRKKLVDSTDKADLRLIYLALAHMIKFRGHFLIEGDLNPDNSDVDKLFIQLVQTYNQLFEENPINASGVDAKAILSARLSKSRRLENLIAQLPGEKKNGLFGNLIALSLGLTPNFKSNFDLAEDAKLQLSKDTYDDDLDNLLAQIGDQYADLFLAAKNLSDAILLSDILRVNTEITKAPLSASMIKRYDEHHQDLTLLKALVRQQLPEKYKEIFFDQSKNGYAGYIDGGASQEEFYKFIKPILEKMDGTEELLVKLNREDLLRKQRTFDNGSIPHQIHLGELHAILRRQEDFYPFLKDNREKIEKILTFRIPYYVGPLARGNSRFAWMTRKSEETITPWNFEEVVDKGASAQSFIERMTNFDKNLPNEKVLPKHSLLYEYFTVYNELTKVKYVTEGMRKPAFLSGEQKKAIVDLLFKTNRKVTVKQLKEDYFKKIECFDSVEISGVEDRFNASLGTYHDLLKIIKDKDFLDNEENEDILEDIVLTLTLFEDREMIEERLKTYAHLFDDKVMKQLKRRRYTGWGRLSRKLINGIRDKQSGKTILDFLKSDGFANRNFMQLIHDDSLTFKEDIQKAQVSGQGDSLHEHIANLAGSPAIKKGILQTVKVVDELVKVMGRHKPENIVIEMARENQTTQKGQKNSRERMKRIEEGIKELGSQILKEHPVENTQLQNEKLYLYYLQNGRDMYVDQELDINRLSDYDVDHIVPQSFLKDDSIDNKVLTRSDKNRGKSDNVPSEEVVKKMKNYWRQLLNAKLITQRKFDNLTKAERGGLSELDKAGFIKRQLVETRQITKHVAQILDSRMNTKYDENDKLIREVKVITLKSKLVSDFRKDFQFYKVREINNYHHAHDAYLNAVVGTALIKKYPKLESEFVYGDYKVYDVRKMIAKSEQEIGKATAKYFFYSNIMNFFKTEITLANGEIRKRPLIETNGETGEIVWDKGRDFATVRKVLSMPQVNIVKKTEVQTGGFSKESILPKRNSDKLIARKKDWDPKKYGGFDSPTVAYSVLVVAKVEKGKSKKLKSVKELLGITIMERSSFEKNPIDFLEAKGYKEVKKDLIIKLPKYSLFELENGRKRMLASAGELQKGNELALPSKYVNFLYLASHYEKLKGSPEDNEQKQLFVEQHKHYLDEIIEQISEFSKRVILADANLDKVLSAYNKHRDKPIREQAENIIHLFTLTNLGAPAAFKYFDTTIDRKRYTSTKEVLDATLIHQSITGLYETRIDLSQLGGD

SEQ ID NO: 38 - protein, 364 aa, Artificial sequence
  Synthetic polypeptide
SEVEFSHEYWMRHALTLAKRAWDEREVPVGAVLVHNNRVIGEGWNRPIGRHDPTAHAEIMALRQGGLVMQNYRLIDATLYVTLEPCVMCAGAMIHSRIGRVVFGARDAKTGAAGSLMDVLHHPGMNHRVEITEGILADECAALLSDFFRMRRQEIKAQKKAQSSTDSGGSSGGSSGSETPGTSESATPESSGGSSGGSSEVEFSHEYWMRHALTLAKRARDEREVPVGAVLVLNNRVIGEGWNRAIGLHDPTAHAEIMALRQGGLVMQNYRLIDATLYVTFEPCVMCAGAMIHSRIGRVVFGVRNAKTGAAGSLMDVLHYPGMNHRVEITEGILADECAALLCYFFRMPRQVFNAQKKAQSSTD

SEQ ID NO: 39 - protein, 167 aa, Artificial sequence
  Synthetic polypeptide
MSEVEFSHEYWMRHALTLAKRARDEREVPVGAVLVLNNRVIGEGWNRAIGLHDPTAHAEIMALRQGGLVMQNYRLYDATLYSTFEPCVMCAGAMIHSRIGRVVFGVRNAKTGAAGSLMDVLHHPGMNHRVEITEGILADECAALLCRFFRMPRRVFNAQKKAQSSTD

SEQ ID NO: 40 - protein, 167 aa, Artificial sequence
  Synthetic polypeptide
MSEVEFSHEYWMRHALTLAKRARDEREVPVGAVLVLNNRVIGEGWNRAIGLHDPTAHAEIMALRQGGLVMQNYRLIDATLYVTFEPCVMCAGAMIHSRIGRVVFGVRNSKRGAAGSLMNVLNYPGMNHRVEITEGILADECAALLCDFYRMPRQVFNAQKKAQSSIN

SEQ ID NO: 41 - protein, 83 aa, Bacillus phage AR9
TNLSDIIEKETGKQLVIQESILMLPEEVEEVIGNKPESDILVHTAYDESTDENVMLLTSDAPEYKPWALVIQDSNGENKIKML

SEQ ID NO: 42 - RNA, 19 nt, Artificial sequence
  Synthetic oligonucleotide
  misc_feature (1)..(19): n is a, c, g, or u
nnnnnnnnnnnnnnnnnnn

SEQ ID NO: 43 - DNA, 22 bp, Artificial sequence
  Synthetic oligonucleotide
  misc_feature (1)..(3): n is a, c, g, or t
  misc_feature (4)..(22): n is a, c, g, or t
nnnnnnnnnnnnnnnnnnnaaa

SEQ ID NO: 44 - DNA, 22 bp, Artificial sequence
  Synthetic oligonucleotide
  misc_feature (4)..(22): n is a, c, g, or t
tttnnnnnnnnnnnnnnnnnnn

SEQ ID NO: 45 - protein, 24 aa, Artificial sequence
  Synthetic peptide
EELLSKNYHLENEVARLKKGSGSG

SEQ ID NO: 46 - protein, 241 aa, Artificial sequence
  Synthetic polypeptide
EEELLSKNYHLENEVARLKKGSGSGEELLSKNYHLENEVARLKKGSGSGEELLSKNYHLENEVARLKKGSGSGEELLSKNYHLENEVARLKKGSGSGEELLSKNYHLENEVARLKKGSGSGEELLSKNYHLENEVARLKKGSGSGEELLSKNYHLENEVARLKKGSGSGEELLSKNYHLENEVARLKKGSGSGEELLSKNYHLENEVARLKKGSGSGEELLSKNYHLENEVARLKKGSGSG

SEQ ID NO: 47 - protein, 277 aa, Artificial sequence
  Synthetic polypeptide
MGPDIVMTQSPSSLSASVGDRVTITCRSSTGAVTTSNYASWVQEKPGKLFKGLIGGTNNRAPGVPSRFSGSLIGDKATLTISSLQPEDFATYFCALWYSNHWVFGQGTKVELKRGGGGSGGGGSGGGGSSGGGSEVKLLESGGGLVQPGGSLKLSCAVSGFSLTDYGVNWVRQAPGRGLEWIGVIWGDGITDYNSALKDRFIISKDNGKNTVYLQMSKVRSDDTALYYCVTGLFDYWGQGTLVTVSSYPYDVPDYAGGGGGSGGGGSGGGGSGGGGS

SEQ ID NO: 48 - DNA, 66 bp, Saccharomyces bayanus
ttcttgtcgtacttatagatcgctacgttatttcaattttgaaaatctgagtcctgggagtgcgga

SEQ ID NO: 49 - protein, 605 aa, Homo sapiens
MSGWESYYKTEGDEEAEEEQEENLEASGDYKYSGRDSLIFLVDASKAMFESQSEDELTPFDMSIQCIQSVYISKIISSDRDLLAWFYGTEKDKNSVNFKIYVLQELDNPGAKRILELDQFKGQQGQKRFQDMMGHGSDYSLSEVLWVCANLFSDVQFKMSHKRIMLFTNEDNPHGNDSAKASRARTKAGDLRDTGIFLDLHLKKPGGFDISLFYRDIISIAEDEDLRVHFEESSKLEDLLRKVRAKETRKRALSRLKLKLNKDIVISVGIYNLVQKALKPPPIKLYRETNEPVKTKTRTFNTSTGGLLLPSDTKRSQIYGSRQIILEKEETEELKRFDDPGLMLMGFKPLVLLKKHHYLRPSLFVYPEESLVIGSSTLFSALLIKCLEKEVAALCRYTPRRNIPPYFVALVPQEEELDDQKIQVTPPGFQLVFLPFADDKRKMPFTEKIMATPEQVGKMKAIVEKLRFTYRSDSFENPVLQQHFRNLEALALDLMEPEQAVDLTLPKVEAMNKRLGSLVDEFKELVYPPDYNPEGKVTKRKHDNEGSGSKRPKVEYSEEELKTHISKGTLGKFTVPLKEACRAYGLKSGLKKQELLEALTKHFQD

SEQ ID NO: 50 - protein, 482 aa, Artificial sequence
  Synthetic polypeptide
MVRSGNKAAWLCMDVGFTMSNSIPGIESPFEQAKKVITMFVQRQVFAENKDEIALVLFGTDGTDNPLSGGDQYQNITVHRHLMLPDFDLLEDIESKIQPGSQQADFLDALIVSMDVIQHETIGKKFEKRHIEIFTDLSSRFSKSQLDIIIHSLKKCDISERHSIHWPCRLTIGSNLSIRIAAYKSILQERVKKTTWDAKTLKKEDIQKETVYCLNDDDETEVLKEDIIQGFRYGSDIVPFSKVDEEQMKYKSEGKCFSVLGFCKSSQVQRRFFMGNQVLKVFAARDDEAAAVALSSLIHALDDLDIWAIVRYAYDKRANPQVGVAFPHIKHNYECLVYVQLPFMEDLRQYMFSSLKNSKKYAPTEAQLNAVDALIDSMSLAKKDEKTDTLEDLFPTTKIPNPRFQRLFQCLLHRALHPREPLPPIQQHIWNMLNPPAEVTTKSQIPLSKIKTLFPLIEAKKKDQVTAQEIFQDNHEDGPTAK

SEQ ID NO: 51 - DNA, 10 bp, Methanobacterium thermoautotrophicum
aatttttgga

SEQ ID NO: 52 - protein, 83 aa, Methanobacterium thermoautotrophicum
GSVIDVSSQRVNVQRPLDALGNSLNSPVIIKLKGDREFRGVLKSFDLHMNLVLNDAEELEDGEVTRRLGTVLIRGDNIVYISP

SEQ ID NO: 53 - DNA, 25 bp, Bacteriophage MS2
gcgcacatgaggatcacccatgtgc

SEQ ID NO: 54 - protein, 116 aa, Bacteriophage MS2
MASNFTQFVLVDNGGTGDVTVAPSNFANGIAEISSNSRSQAYKVTCSVRQSSAQNRKYTIKVEVPKGAWRSYLNMELTIPIFATNSDCELIVKAMQGLLKDGNPIPSAIAANSGIY

SEQ ID NO: 55 - DNA, 26 bp, Bacteriophage PP7
ataaggagtttatatggaaaccctta

SEQ ID NO: 56 - protein, 127 aa, Bacteriophage PP7
MSKTIVLSVGEATRTLTEIQSTADRQIFEEKVGPLVGRLRLTASLRQNGAKTAYRVNLKLDQADWDCSTSVCGELPKVRYTQVWSHDVTIVANSTEASRKSLYDLTKSLVATSQVEDLVVNLVPLGR

SEQ ID NO: 57 - DNA, 19 bp, Shigella phage
ctgaatgcctgcgagcatc

SEQ ID NO: 58 - protein, 62 aa, Shigella phage
MKSIRCKNCNKLLFKADSFDHIEIRCPRCKRHIIMLNACEHPTEKHCGKREKITHSDETVRY

SEQ ID NO: 59 - protein, 1367 aa, Artificial sequence
  Synthetic polypeptide
DKKYSIGLAIGTNSVGWAVITDEYKVPSKKFKVLGNTDRHSIKKNLIGALLFDSGETAEATRLKRTARRRYTRRKNRICYLQEIFSNEMAKVDDSFFHRLEESFLVEEDKKHERHPIFGNIVDEVAYHEKYPTIYHLRKKLVDSTDKADLRLIYLALAHMIKFRGHFLIEGDLNPDNSDVDKLFIQLVQTYNQLFEENPINASGVDAKAILSARLSKSRRLENLIAQLPGEKKNGLFGNLIALSLGLTPNFKSNFDLAEDAKLQLSKDTYDDDLDNLLAQIGDQYADLFLAAKNLSDAILLSDILRVNTEITKAPLSASMIKRYDEHHQDLTLLKALVRQQLPEKYKEIFFDQSKNGYAGYIDGGASQEEFYKFIKPILEKMDGTEELLVKLNREDLLRKQRTFDNGSIPHQIHLGELHAILRRQEDFYPFLKDNREKIEKILTFRIPYYVGPLARGNSRFAWMTRKSEETITPWNFEEVVDKGASAQSFIERMTNFDKNLPNEKVLPKHSLLYEYFTVYNELTKVKYVTEGMRKPAFLSGEQKKAIVDLLFKTNRKVTVKQLKEDYFKKIECFDSVEISGVEDRFNASLGTYHDLLKIIKDKDFLDNEENEDILEDIVLTLTLFEDREMIEERLKTYAHLFDDKVMKQLKRRRYTGWGRLSRKLINGIRDKQSGKTILDFLKSDGFANRNFMQLIHDDSLTFKEDIQKAQVSGQGDSLHEHIANLAGSPAIKKGILQTVKVVDELVKVMGRHKPENIVIEMARENQTTQKGQKNSRERMKRIEEGIKELGSQILKEHPVENTQLQNEKLYLYYLQNGRDMYVDQELDINRLSDYDVDHIVPQSFLKDDSIDNKVLTRSDKNRGKSDNVPSEEVVKKMKNYWRQLLNAKLITQRKFDNLTKAERGGLSELDKAGFIKRQLVETRQITKHVAQILDSRMNTKYDENDKLIREVKVITLKSKLVSDFRKDFQFYKVREINNYHHAHDAYLNAVVGTALIKKYPKLESEFVYGDYKVYDVRKMIAKSEQEIGKATAKYFFYSNIMNFFKTEITLANGEIRKRPLIETNGETGEIVWDKGRDFATVRKVLSMPQVNIVKKTEVQTGGFSKESILPKRNSDKLIARKKDWDPKKYGGFDSPTVAYSVLVVAKVEKGKSKKLKSVKELLGITIMERSSFEKNPIDFLEAKGYKEVKKDLIIKLPKYSLFELENGRKRMLASAGELQKGNELALPSKYVNFLYLASHYEKLKGSPEDNEQKQLFVEQHKHYLDEIIEQISEFSKRVILADANLDKVLSAYNKHRDKPIREQAENIIHLFTLTNLGAPAAFKYFDTTIDRKRYTSTKEVLDATLIHQSITGLYETRIDLSQLGGD

SEQ ID NO: 60 - protein, 1367 aa, Artificial sequence
  Synthetic polypeptide
DKKYSIGLAIGTNSVGWAVITDEYKVPSKKFKVLGNTDRHSIKKNLIGALLFDSGETAEATRLKRTARRRYTRRKNRICYLQEIFSNEMAKVDDSFFHRLEESFLVEEDKKHERHPIFGNIVDEVAYHEKYPTIYHLRKKLVDSTDKADLRLIYLALAHMIKFRGHFLIEGDLNPDNSDVDKLFIQLVQTYNQLFEENPINASGVDAKAILSARLSKSRRLENLIAQLPGEKKNGLFGNLIALSLGLTPNFKSNFDLAEDAKLQLSKDTYDDDLDNLLAQIGDQYADLFLAAKNLSDAILLSDILRVNTEITKAPLSASMIKRYDEHHQDLTLLKALVRQQLPEKYKEIFFDQSKNGYAGYIDGGASQEEFYKFIKPILEKMDGTEELLVKLNREDLLRKQRTFDNGSIPHQIHLGELHAILRRQEDFYPFLKDNREKIEKILTFRIPYYVGPLARGNSRFAWMTRKSEETITPWNFEEVVDKGASAQSFIERMTNFDKNLPNEKVLPKHSLLYEYFTVYNELTKVKYVTEGMRKPAFLSGEQKKAIVDLLFKTNRKVTVKQLKEDYFKKIECFDSVEISGVEDRFNASLGTYHDLLKIIKDKDFLDNEENEDILEDIVLTLTLFEDREMIEERLKTYAHLFDDKVMKQLKRRRYTGWGRLSRKLINGIRDKQSGKTILDFLKSDGFANRNFMQLIHDDSLTFKEDIQKAQVSGQGDSLHEHIANLAGSPAIKKGILQTVKVVDELVKVMGRHKPENIVIEMARENQTTQKGQKNSRERMKRIEEGIKELGSQILKEHPVENTQLQNEKLYLYYLQNGRDMYVDQELDINRLSDYDVDHIVPQSFLADDSIDNKVLTRSDKNRGKSDNVPSEEVVKKMKNYWRQLLNAKLITQRKFDNLTKAERGGLSELDKAGFIKRQLVETRQITKHVAQILDSRMNTKYDENDKLIREVKVITLKSKLVSDFRKDFQFYKVREINNYHHAHDAYLNAVVGTALIKKYPALESEFVYGDYKVYDVRKMIAKSEQEIGKATAKYFFYSNIMNFFKTEITLANGEIRKAPLIETNGETGEIVWDKGRDFATVRKVLSMPQVNIVKKTEVQTGGFSKESILPKRNSDKLIARKKDWDPKKYGGFDSPTVAYSVLVVAKVEKGKSKKLKSVKELLGITIMERSSFEKNPIDFLEAKGYKEVKKDLIIKLPKYSLFELENGRKRMLASAGELQKGNELALPSKYVNFLYLASHYEKLKGSPEDNEQKQLFVEQHKHYLDEIIEQISEFSKRVILADANLDKVLSAYNKHRDKPIREQAENIIHLFTLTNLGAPAAFKYFDTTIDRKRYTSTKEVLDATLIHQSITGLYETRIDLSQLGGD

SEQ ID NO: 61 - DNA, 4101 bp, Artificial sequence
  Synthetic polynucleotide
gacaagaagtacagcatcgggctggcgatcgggaccaactccgtcggctgggctgtgattaccgacgagtacaaggtgccatccaagaagttcaaggtcctcggcaacactgaccggcacagcattaagaagaacctgattggggcgctgctgttcgattcgggggagactgcggaggcgaccaggctgaagcggactgcgcgccggaggtacaccaggaggaagaatcggatctgctacctccaggagattttctcgaatgagatggccaaggtggacgattccttcttccatcgcctggaggagtcgttcctcgttgaggaggacaagaagcatgagaggcatcccattttcgggaatatcgttgacgaggtggcttaccatgagaagtacccgaccatctaccatctgcggaagaagctcgtcgattcgaccgataaggccgacctgcggctgatctacctggccctcgcgcacatgattaagttccggggccatttcctcatcgagggcgacctcaacccggacaactcggacgtggataagctcttcattcagctcgtgcagacatacaaccagctcttcgaggagaatcccattaacgcctcgggggtcgacgctaaggctattctctcggctcggctgtcgaagtcgcgccggctggagaatctcattgcccagctcccaggcgagaagaagaacggcctcttcggcaacctgattgccctgtcgctggggctcacaccgaatttcaagtcgaacttcgacctcgccgaggacgctaagctccagctcagcaaggatacttacgatgatgacctcgataacctgctcgcccagattggggatcagtacgcggatctgttcctcgcggccaagaatctcagcgatgctattctcctgtcggacattctccgcgtcaacacagagattactaaggccccactgtcggcgagcatgattaagaggtacgatgagcatcatcaggacctgacactgctcaaggcgctggtccggcagcagctccccgagaagtacaaggagattttcttcgatcagtcaaagaatgggtacgcgggctacattgatggcggcgcgtcccaggaggagttctacaagttcattaagcccatcctggagaagatggacgggaccgaggagctgctggtgaagctcaatcgggaggacctgctccggaagcagcgcacattcgacaatggctcgattcctcaccagattcacctgggcgagctgcacgccattctccgcaggcaggaggacttctacccgttcctcaaggacaaccgcgagaagatcgagaagatcctgaccttccggattccatactacgtggggccgctcgcgcgggggaactcccggttcgcgtggatgactcgcaagtccgaagaaacgattacaccgtggaatttcgaggaggtcgtcgacaagggcgctagtgcgcagtcattcattgagaggatgaccaatttcgataagaacctgcctaacgagaaggtgctgccgaagcattcgctgctctacgagtacttcaccgtttacaatgagctgaccaaggtgaagtatgtgactgagggcatgaggaagccagcgttcctgagcggcgagcagaagaaggctatcgtggacctgctcttcaagactaaccggaaggtgactgtgaagcagctcaaggaggactacttcaagaagattgagtgcttcgattccgttgagattagcggggtggaggatcggttcaatgcttcgctcgggacataccacgatctcctgaagatcattaaggataaggacttcctcgacaacgaggagaacgaggacattctcgaagatattgtcctgaccctcaccctcttcgaggatcgggagatgatcgaggagaggctcaagacatacgctcatctgttcgatgataaggtcatgaagcagctgaagcgcaggcggtacacagggtgggggcggctgagccggaagctgatcaacgggattcgggataagcagtccgggaagacaattctcgacttcctcaagtccgacgggttcgctaaccggaacttcatgcagctcattcatgatgactcgctgacattcaaggaggatattcagaaggcgcaggtttcggggcagggcgactcgctccacgagcatattgcgaatctggcgggctcccccgcgattaagaagggcattctgcaaaccgtcaaggtggttgatgagctggtcaaggtcatggggcggcataagccagagaatattgtcatcgagatggcgcgggagaatcagaccacacagaaggggcagaagaactcacgggagcggatgaagcgcatcgaggagggcatcaaggagctggggtcgcagatcctgaaggagcatcccgtggagaacactcagctgcaaaatgagaagctgtacctctactacctccagaacgggagggacatgtatgtggatcaggagctggatattaataggctgagcgattacgatgtcgaccacattgtcccacagtcgttcctgaaggacgacagcattgacaacaaggtgctgacccgctcggataagaacaggggcaagagcgataatgttccaagcgaggaggttgtgaagaagatgaagaactactggcggcagctcctgaacgcgaagctcatcacacagcggaagttcgacaacctcaccaaggctgagcgcgggggcctgagcgagctggacaaggcggggttcattaagaggcagctggtcgagacacggcagattacaaagcatgttgcgcagattctcgattcccggatgaacaccaagtacgatgagaacgataagctgattcgggaggtcaaggtaattaccctgaagtccaagctggtgtccgacttcaggaaggacttccagttctacaaggttcgggagatcaacaactaccaccacgcgcatgatgcctacctcaacgcggtcgtggggaccgctctcatcaagaagtacccaaagctggagtcagagttcgtctacggggattacaaggtttacgacgtgcggaagatgatcgctaagagcgagcaggagattggcaaggctaccgctaagtacttcttctactccaacatcatgaacttcttcaagacagagattaccctcgcgaatggcgagatccggaagaggcccctcatcgagacaaatggggagacaggggagattgtctgggataaggggcgggatttcgcgaccgtccggaaggtcctgtcgatgccccaggttaatattgtcaagaagactgaggtccagactggcggcttctcaaaggagtcgattctcccaaagaggaactccgataagctcattgctcggaagaaggattgggaccccaagaagtacgggggattcgactcccccactgttgcttactctgttctggttgttgctaaggtggagaaggggaagtcgaagaagctgaagagcgtgaaggagctgctcgggattacaattatggagaggtcatccttcgagaagaatcccatcgacttcctggaggccaagggctacaaggaggtgaagaaggacctgattattaagctgcccaagtactcgctcttcgagctggagaatgggcggaagcggatgctggcgtccgcgggggagctgcaaaaggggaacgagctggcgctcccctccaagtatgtgaacttcctctacctggcgtcgcactacgagaagctgaaggggtccccagaggataatgagcagaagcagctcttcgtcgagcagcataagcactacctggacgagattatcgagcagattagcgagttctcgaagcgggtcatcctcgcggatgcgaacctggataaggtgctcagcgcctacaataagcaccgggacaagccgattcgggagcaggcggagaatattattcacctcttcacactcaccaacctcggggcaccagctgcgttcaagtacttcgacactactatcgaccggaagcggtacacctcgacgaaggaggtgctcgacgccaccctcattcaccagtcgatcacaggcctgtacgagacacggattgacctgtcccagctcgggggcgac

SEQ ID NO: 62 - DNA, 4101 bp, Artificial sequence
  Synthetic polynucleotide
gacaagaagtactccattggcctggcgattgggacaaactcggtggggtgggccgtgattacggatgagtacaaggttccaagcaagaagttcaaggtcctcgggaacacagatcggcattcgattaagaagaatctcattggggcgctcctcttcgactcgggggagacagcggaggctaccaggctcaagcggacagccaggcggcggtacacaaggcggaagaatcgcatctgctacctccaggagattttctcgaatgagatggcgaaggtggacgacagcttcttccatcggctggaggagtccttcctggtggaggaggataagaagcacgagaggcatccaattttcgggaacatcgtggacgaggttgcgtaccatgagaagtaccctacaatctaccatctgcggaagaagctggttgactccacagacaaggcggacctgaggctgatctacctcgctctggcccacatgattaagttccgcgggcatttcctgatcgagggggacctgaatcccgacaattcggatgtggacaagctcttcatccagctggtgcagacctacaaccagctgttcgaggagaatcccatcaatgcgtcgggcgttgacgctaaggccattctgtccgctaggctgtcgaagagcaggaggctggagaacctgatcgcccagctgccaggcgagaagaagaatgggctcttcgggaatctgattgcgctctccctggggctgacaccgaacttcaagagcaatttcgatctggctgaggacgcgaagctccagctctcgaaggacacttacgacgatgacctcgataacctcctcgcgcagatcggggaccagtacgctgatctcttcctcgccgctaagaacctctcggatgctatcctgctctccgacattctccgggttaataccgagattacaaaggccccactgtcggcgtccatgatcaagcggtacgatgagcatcatcaggatctcaccctgctcaaggccctcgtgcggcagcagctgcccgagaagtacaaggagattttcttcgaccagagcaagaatgggtacgctggctacattgacggcggggcctcacaggaggagttctacaagttcatcaagccaatcctggagaagatggatgggacagaggagctgctggtgaagctcaaccgggaggatctgctcaggaagcagcggacgttcgacaacgggtcgattccccatcagatccacctgggggagctgcacgcgatcctgcgccggcaggaggatttctaccctttcctgaaggataatcgggagaagatcgagaagattctcaccttccggattccctactacgtcgggccactcgcgcggggcaatagcaggttcgcctggatgacacggaagagcgaggagacaatcaccccctggaacttcgaggaggttgtcgacaagggggcgtccgcccagtcattcattgagcggatgaccaatttcgacaagaatctgccaaatgagaaggttctcccaaagcatagcctcctctacgagtacttcactgtttacaacgagctgaccaaggtgaagtatgtgaccgagggcatgcggaagcccgcgttcctgtccggcgagcagaagaaggccattgtggacctcctgttcaagaccaatcgcaaggtcacagtcaagcagctcaaggaggattacttcaagaagatcgagtgcttcgactcggttgagattagcggggtggaggatcggttcaacgcgagcctcggcacttaccacgacctcctgaagatcatcaaggataaggacttcctcgacaacgaggagaacgaggatattctggaggacatcgtgctcaccctgacgctgttcgaggatcgggagatgatcgaggagcgcctgaagacctacgctcatctcttcgatgataaggtcatgaagcagctgaagaggaggcggtacaccgggtggggccgcctgagcaggaagctcattaacgggatcagggacaagcagagcggcaagaccatcctggacttcctcaagagcgatggcttcgccaaccggaatttcatgcagctcatccacgacgactccctcaccttcaaggaggacattcagaaggctcaggtcagcggccagggcgactcgctgcatgagcacatcgctaacctggcgggcagcccagccatcaagaagggcatcctccagacagtgaaggtcgtggatgagctggtgaaggtcatgggccggcataagcccgagaatattgtgattgagatggcgcgggagaatcagaccactcagaagggccagaagaactcgcgggagcgcatgaagaggatcgaggaggggattaaggagctgggcagccagattctcaaggagcaccccgtggagaatacccagctccagaacgagaagctgtacctctactacctccagaatgggcgggacatgtatgttgatcaggagctggacatcaatcgcctctcggattacgacgtggaccacatcgtgccccagagcttcctgaaggatgatagcatcgacaataaggtcctgacccgctccgacaagaatcgcggcaagagcgacaacgtgccgagcgaggaggtcgtgaagaagatgaagaactactggcggcagctgctgaacgcgaagctcattacacagcggaagttcgataacctgacgaaggcggagaggggcggcctctccgagctggacaaggcgggcttcattaagaggcagctcgtggagactcgccagatcaccaagcacgtggctcagatcctcgatagccggatgaatacgaagtacgatgagaatgacaagctcatccgggaggtgaaggtaatcaccctgaagtcaaagctcgttagcgatttccggaaggacttccagttctacaaggtgcgggagattaacaactaccatcatgcgcacgatgcgtacctcaatgcggtggtgggcacagccctgattaagaagtaccccaagctggagagcgagttcgtctacggggactacaaggtgtacgatgttcggaagatgatcgccaagagcgagcaggagattgggaaggccaccgctaagtacttcttctactcgaatattatgaatttcttcaagaccgagatcacactcgctaatggggagattcggaagcggcccctcatcgagactaacggggagactggcgagattgtgtgggacaaggggcgcgacttcgctaccgtgcgcaaggtcctctcgatgccccaggttaatattgttaagaagacagaggtgcagacgggcgggttctccaaggagtctatcctgccgaagcggaactcggacaagctgatcgcccgcaagaaggattgggaccccaagaagtacgggggattcgatagcccaaccgtggcttacagcgtcctggtggtcgccaaggttgagaaggggaagtcgaagaagctcaagagcgttaaggagctgctgggcatcaccatcatggagcggtccagcttcgagaagaatcctatcgacttcctggaggctaaggggtacaaggaggtcaagaaggacctgatcattaagctgcccaagtactctctgttcgagctggagaacgggaggaagcggatgctggcgtctgctggcgagctacagaagggcaatgagctggcgctcccctcgaagtatgtcaacttcctctacctggcttcccattacgagaagctgaagggctcgcccgaggataatgagcagaagcagctcttcgtggagcagcacaagcactacctcgacgagatcattgagcagatttcggagttctcgaagcgggtcattctcgcggacgcgaacctcgacaaggtcctctcggcgtacaacaagcaccgggacaagcccatccgggagcaggccgagaacattatccacctcttcacactgaccaacctcggcgctcccgccgcgttcaagtacttcgacaccaccattgaccgcaagagatacacatccaccaaggaggtgctggacgcgaccctcatccaccagagcatcacaggcctctacgagacacggatcgacctctcgcagctcgggggcgat

SEQ ID NO: 63 - DNA, 4092 bp, Artificial sequence
  Synthetic polynucleotide
gacaagaagtactcgatcggcctggcgattggcacaaacagcgtggggtgggctgtgatcactgatgagtacaaggtgccatcgaagaagttcaaggtgctggggaatacagaccggcattcgatcaagaagaatctcattggcgctctcctcttcgattccggcgagactgctgaggcgacccgcctgaagcgcaccgcccggcggcgctacactcggcggaagaataggatttgctacctccaggagattttctcgaatgagatggccaaggtggatgacagcttcttccaccgcctggaggagtcgttcctggtcgaggaggacaagaagcatgagcggcaccctatcttcgggaatatcgttgatgaggtcgcctaccacgagaagtaccccactatctaccatctccgcaagaagctcgtggacagcacagataaggccgacctccgcctgatctacctcgccctcgcgcacatgattaagttccgggggcacttcctcattgagggggatctgaatcccgataactccgacgtggacaagctgttcatccagctggtgcagacatacaaccagctgttcgaggagaatcccatcaacgcgagcggcgtggacgctaaggccattctgtcggctaggctctcgaagtcgaggcggctggagaacctgattgcgcagctccccggcgagaagaagaacgggctgttcgggaatctcatcgccctctccctcggcctcacaccaaacttcaagagcaatttcgacctggctgaggacgctaagctgcaactctcaaaggatacatacgatgacgacctggacaatctcctggctcagatcggcgaccagtacgctgacctgttcctcgcggccaagaatctgtcggacgcgattctcctcagcgacatcctgcgcgtcaataccgagattacgaaggctccactgtctgcgtcaatgattaagcggtacgatgagcatcaccaggatctgaccctcctgaaggcgctcgtgcggcagcagctgcccgagaagtacaaggagattttcttcgatcagagcaagaatggctacgccggctacatcgacgggggcgcgagccaggaggagttctacaagttcatcaagcccatcctggagaagatggacggcaccgaggagctactcgtgaagctcaatcgggaggatctcctccggaagcagcggacattcgataacgggtctatcccacaccagatccacctcggcgagctgcatgcgattctgcggcggcaggaggatttctaccctttcctgaaggacaaccgggagaagatcgagaagatcctcacattccggattccatactacgtcggccccctggcgaggggcaatagccggttcgcgtggatgacaaggaagtccgaggagactattaccccgtggaatttcgaggaggtggttgacaagggcgcttccgcgcagagcttcattgagcggatgacaaacttcgacaagaatctccccaacgagaaggtcctgccgaagcatagcctcctgtacgagtacttcaccgtctacaatgagctaactaaggtcaagtatgtgacagagggcatgaggaagccagccttcctctcaggcgagcagaagaaggccattgtggacctcctgttcaagacaaaccgcaaggtgacagtgaagcagctgaaggaggattacttcaagaagattgagtgcttcgactcagtggagatttcaggcgtggaggatcggttcaacgcgagcctggggacttaccacgacctgctgaagattattaaggacaaggacttcctggataacgaggagaatgaggacatcctggaggatattgtgctcaccctcaccctgttcgaggacagggagatgattgaggagaggctcaagacctacgcgcacctgttcgatgacaaggtcatgaagcagctgaagaggcggcgctacactgggtggggccgcctgtcgcggaagctgatcaacggcattcgggataagcagtccgggaagaccattctggatttcctgaagtcggacggcttcgccaacaggaatttcatgcagctgatccacgacgactccctcaccttcaaggaggacattcagaaggcccaggttagcggccagggggactcactccacgagcatattgccaatctggccggctctccagctatcaagaagggcatcctgcaaacagttaaggttgttgacgagctggttaaggtcatggggcggcataagcccgagaacattgtcatcgagatggctcgggagaaccagacaactcagaagggccagaagaactccagggagcgcatgaagcggattgaggagggcattaaggagctggggtcccagatcctcaaggagcaccctgtcgagaacactcagctgcaaaacgagaagctctacctgtactacctccagaacgggcgggatatgtatgtggatcaggagctggacatcaacaggctctccgactacgacgtggatcacattgtcccacagtctttcctcaaggatgattccatcgacaacaaggtgctgacgcgcagcgacaagaatagggggaagtcggacaacgttccgagcgaggaggtcgtgaagaagatgaagaattactggaggcagctcctgaatgcgaagctgatcactcagaggaagttcgacaatctgacaaaggcggagaggggcgggctctcggagctggataaggcgggcttcatcaagcggcagctcgttgaaacccggcagatcaccaagcatgtcgcccagatcctcgatagccgcatgaacaccaagtacgatgagaacgacaagctcattcgggaggttaaggtcattacgctgaagtccaagctcgtcagcgacttcaggaaggatttccagttctacaaggttcgggagattaacaactaccaccacgcgcatgatgcgtacctgaacgctgttgtcggcactgctctcatcaagaagtacccaaagctggagtccgagttcgtctacggggactacaaggtctacgatgtccggaagatgatcgccaagtcggagcaggagatcgggaaggctactgcgaagtacttcttctacagcaacattatgaatttcttcaagacggagattacgctggcgaacggggagattaggaagaggcccctcattgagactaatggggagacaggcgagattgtttgggacaagggccgcgacttcgcgactgtgcggaaggtcctgtccatgccacaggtgaatattgttaagaagacagaggtgcagactgggggcttctcgaaggagagcattctcccaaagcggaacagcgataagctcatcgcgcgcaagaaggattgggaccctaagaagtacggcggcttcgattctcccactgtggcctactccgttctcgtggttgccaaggttgagaaggggaagtcgaagaagctgaagtcggtcaaggagctgctcgggattacaatcatggagcggagcagcttcgagaagaaccctattgatttcctggaggccaagggctacaaggaggttaagaaggatctcattatcaagctccctaagtactctctgttcgagctggagaatggccggaagaggatgctggcctcggctggcgagctacagaaggggaatgagctggccctcccgtcgaagtatgtgaatttcctgtacctcgcgtcgcactacgagaagctcaagggcagcccggaggataatgagcagaagcagctcttcgtggagcagcataagcactacctggacgagatcattgagcagatcagcgagttctcgaagcgggttattctggctgatgctaacctggacaaggttctgagcgcctacaataagcatcgcgacaagccgattcgcgagcaggcggagaatattatccacctgttcaccctcactaacctcggggctcccgcggccttcaagtacttcgataccacaatagataggaagcggtacacctcgacgaaggaggtcctcgacgccacactcatccatcagtcgattacaggcctgtacgagacacggattgacctctcgcagctg

SEQ ID NO: 64 - DNA, 4101 bp, Artificial sequence
  Synthetic polynucleotide
gacaagaagtattccataggcctggctatcggcaccaacagcgtgggctgggccgtcatcaccgacgagtacaaagtgccgagtaaaaagttcaaagtgctcggcaacaccgaccgccactccataaagaaaaacctgatcggggcgctcctgttcgacagcggcgagacggcggaggccacccgcttgaaacgcacggcccgacggcgctacacgcggcgcaagaaccggatctgttacctacaggagattttctctaacgagatggcgaaggtggacgactcgttctttcaccgcctcgaagagtccttcctcgtggaggaggacaagaaacacgagcgccacccgatcttcggcaacatcgtggacgaggtggcctaccacgagaagtacccgaccatctaccacctccggaagaaactcgtggacagcacggacaaggccgacctgaggctcatctacctcgccctggcgcacatgattaagttccggggccacttcctgatcgagggcgacctgaacccggacaacagcgacgtggacaagctgttcatccagctagtccagacctacaaccagcttttcgaggaaaaccccatcaacgccagcggggtggacgcgaaggcgatcctgtccgcccggctgagcaagtcccggcggctggagaacctcatcgcgcagttgcccggcgagaagaagaacgggctgttcgggaacctgatcgccctctccctggggctcaccccgaacttcaagtccaacttcgacctcgccgaggacgccaaactacagctgagcaaggacacctacgacgacgacctcgacaacctgctggcccagatcggggaccagtacgcagacctgttcctcgccgccaagaacctctccgacgccatcctgctgtcggacatcctgcgggtgaacacggagatcacgaaggccccgctctcggcctcgatgattaaacgctacgacgagcaccaccaggacttgaccctcctcaaggcgctggtccgccagcagcttcccgagaagtacaaggaaatctttttcgatcagagcaagaacgggtacgccgggtacatcgacggcggggcgtcccaggaggagttctacaagttcatcaagcccatcctggagaaaatggacgggaccgaggagctgctcgtgaagctcaaccgcgaagatttgctccgcaagcagcgcacgttcgacaacgggtcgatcccgcaccagatccacctgggcgagctgcacgcgatcctcaggcgtcaggaagacttctaccccttcctcaaggacaaccgcgagaagatagagaagattctgaccttcagaattccttattacgtgggcccgctggctcggggcaactcgcgcttcgcctggatgacgcgcaagtccgaggagaccatcaccccgtggaacttcgaggaggtggtggataagggtgcctcggcccagtccttcatcgagcggatgaccaacttcgacaagaacctgccgaacgagaaggtgctccccaagcacagcctgctctacgaatatttcacggtgtacaacgagctgacgaaggtcaagtacgtgaccgagggaatgaggaaacctgcattcctctccggggagcagaagaaagccatagtcgacctcctgttcaagaccaaccggaaggtcaccgtcaagcagctcaaggaggactacttcaagaagatcgagtgcttcgattcagtggagatcagcggcgtcgaggaccggttcaacgccagcctgggcacctaccacgacctgctcaagatcatcaaggacaaggacttcctcgacaacgaggagaacgaggacatcctggaggacatcgtgctgaccctgacgctcttcgaggaccgcgagatgatcgaggagcgcctcaagacctacgcccacctgttcgacgacaaggtgatgaagcagctcaagcggcggagatatactgggtggggccgcctctcccggaagctcattaacggtatcagggataagcagtccgggaagacgatcctcgacttcctcaagtcggacgggttcgccaaccgcaacttcatgcagctcatccacgacgactccctgacgttcaaggaggacatccagaaggcccaagtgtctggtcaaggtgactcgctccacgagcacatcgccaacctcgcgggcagcccggccatcaagaagggaatactccagaccgtcaaggtggtggacgagctggtgaaggtcatgggccgccacaagccggagaacatcgtcatcgagatggcgcgggagaaccagaccacgcagaaggggcagaaaaatagccgtgagcgcatgaagcgcatcgaggaggggattaaggagttgggcagccagatcctcaaggagcaccctgtggagaacacgcagttgcaaaacgagaagctctacctgtactacctccagaacgggagggatatgtacgtggaccaagaactggacatcaaccgcctgtccgactacgacgtggaccacatcgtgccgcagagcttcctcaaggacgacagcatcgacaacaaggtgctcacccggtccgacaagaatcggggcaagtccgacaacgtgcccagcgaggaggtcgtcaaaaagatgaaaaactactggcgacaactactgaacgccaagctcatcacccagcgcaagttcgacaacctcacaaaagccgagcgcggcgggttgagcgagctggacaaggccgggttcatcaagcgccagctcgtcgagacgcgccagatcacgaagcacgtcgcgcagatactcgacagccggatgaacaccaagtacgacgagaacgacaagctcatccgggaggtgaaggtcatcaccctcaagtcgaagctcgtgagcgacttccgcaaggacttccagttctacaaggtccgggagatcaacaactaccaccacgcccacgatgcttatcttaacgccgtggtggggacggccctcattaagaaatacccgaagctggagtcggagttcgtgtacggcgactacaaggtgtacgacgtcaggaagatgatcgccaagtccgaacaggagatcgggaaggccacggcgaaatacttcttctacagcaacatcatgaacttcttcaagaccgagatcaccctcgccaacggcgagatccgcaagcgcccgctcatcgagacgaacggggagaccggcgagatcgtctgggacaaggggcgcgacttcgccactgtgcggaaggtgctgtcgatgccccaggtcaacatcgtcaagaagacggaggtccagacgggcgggttcagcaaggagagcatcctgccgaagcgcaacagcgacaagctgatcgcccgcaaaaaggactgggatccaaaaaagtacggcggcttcgacagccccaccgtcgcctacagcgtcctcgtcgtcgctaaagtcgagaagggcaagtccaaaaagctcaagagcgtcaaggagctgctcgggatcaccatcatggagcggtccagcttcgagaagaacccaattgatttcctggaggcgaagggctacaaggaggtcaagaaagacctcatcataaagctgccgaagtactcactcttcgagctggagaacgggcgcaagcggatgctggcgtcggccggagagctccaaaagggcaacgagctggcgctgccgagcaagtacgtgaacttcctctacctggcgtcccactacgagaagctcaagggcagtccagaggataacgagcagaagcagctattcgtggagcagcacaagcactacctggacgagatcatcgagcagatcagcgagttctccaagcgcgtcatcctggcggacgccaacctggacaaggtgctgtccgcgtacaacaagcaccgcgacaagccgatccgcgagcaagccgagaacatcatccacctgttcaccctcacgaacctcggggcacccgccgccttcaaatatttcgacacgaccatcgaccgcaagcgctacaccagcacgaaggaggtgctcgacgccaccctgatccaccagagcatcaccgggctgtacgagacccgcatcgacctctcgcagctcggcggggac

SEQ ID NO: 65 - DNA, 4101 bp, Artificial sequence
  Synthetic polynucleotide
gacaagaagtacagtattggattggccatcgggacgaacagcgtgggctgggccgtcatcaccgacgagtacaaggtgccatccaagaagtttaaggttctggggaataccgaccgccactcgatcaagaaaaatctcatcggggcgctgcttttcgacagcggcgagacggcggaagcgacgcggctcaagcggacggctcgtcgccgttacacccggcgtaagaaccgcatctgttacctccaggagatattcagcaacgagatggcgaaggtggacgactcctttttccaccgtcttgaggagtccttcctggtcgaggaggacaagaagcacgagcgccacccgatcttcgggaacatcgtggacgaggtggcctaccacgagaagtaccccacgatctaccacctccgcaaaaaactcgtggactcaactgacaaggccgatttgaggcttatctacctcgccctcgcccacatgattaagttccgtgggcacttcctaatcgagggtgacctcaaccccgacaactctgacgtggacaagctgttcatccagcttgtgcagacctacaatcagctctttgaggagaatccgatcaacgcatctggtgtggacgcaaaggccatcctcagcgcgcggctgagcaagtctaggcggttggagaacctgatcgcccaactgcccggcgagaagaaaaatggcctcttcggcaacctgatcgccctgtcgctggggctcacgccgaacttcaagagtaactttgacctggcggaggacgctaagctccagctatctaaggacacatacgacgacgacctggacaacctgctggcccagatcggcgaccagtacgccgacctcttcctagccgccaagaacctgtccgacgccatcctcctcagcgacatcctgcgcgtgaacacggagatcacgaaggctccgctcagcgcctccatgattaagcggtacgacgagcaccaccaagacctaactttactcaaagccctcgtgcggcagcagcttcccgagaagtacaaagagatattttttgatcagtccaagaacggttatgcgggctacatcgacggcggcgcgagccaggaggagttctacaagttcatcaagcccatcctggagaagatggacggcacggaggagctgctcgtgaagctcaaccgtgaagacctcctgcgaaagcagcgaaccttcgacaacggttcgatcccgcaccagatccacctcggggagctgcacgccatcctgaggcgacaggaggacttctaccctttcctaaaggacaaccgcgagaagattgaaaaaatcctgacgtttcgcataccctactacgtcggcccgctggcgcgcggcaactcccggttcgcctggatgacccgtaagagcgaggagacgatcaccccgtggaacttcgaggaggtcgtggacaagggcgcgagcgcgcagagcttcatcgagcgcatgaccaacttcgacaagaacctcccgaacgagaaggtgctcccaaagcactccctcctgtacgagtatttcaccgtgtacaacgagttgacaaaggtgaagtacgtgacggagggaatgcggaagcctgcgttcctctcgggcgagcagaagaaggcaatcgtggacctgctcttcaagaccaaccggaaggtgacggtgaagcagctcaaggaggactacttcaaaaaaatcgagtgcttcgactccgtggagataagcggcgtggaggaccgattcaacgcctccctcggcacctaccacgacctccttaagatcatcaaggacaaggacttcctggacaacgaggagaacgaggacatcctggaggacatcgtgctcaccctgaccctcttcgaggaccgggagatgatcgaggagcgcctcaagacgtacgcccacttgttcgacgacaaggtgatgaagcagctcaagcggcggcgatacaccgggtggggccgcctatcccgcaaacttatcaacggcatccgcgacaagcagtccggcaagacgatcctggatttcctcaagtcggacgggttcgccaaccggaacttcatgcagctcatccacgacgacagcctcacgttcaaggaggacatccagaaggcccaagtgagcggtcaaggggacagcctccacgagcacattgcgaaccttgctgggagccctgcgatcaagaaggggatattgcaaaccgtgaaggtcgtggacgagttggtgaaggtcatggggcgacacaagcccgagaacatcgtgatcgagatggccagggaaaatcagaccacgcagaagggccaaaaaaacagccgcgagcggatgaagcggatcgaggagggcatcaaggagctggggtcgcagatcctcaaggagcacccggtggagaacacgcagctccagaacgagaagctgtacctctattacctacagaacgggcgggatatgtacgtggaccaggagctagacatcaaccgcctgtccgactacgacgtggaccatatcgtcccgcagtcgttcttgaaggacgacagcatcgacaacaaggtgctcacaagatcggataagaatcgaggcaagtccgacaacgtgccctcggaggaggtggtcaagaaaatgaaaaactactggcggcagttgctgaacgccaagctcattacgcagcggaagttcgacaacctgacgaaggctgaacgtggtgggctcagcgagctagacaaggcggggttcatcaagcggcagctcgtcgagacccggcagatcaccaagcacgtggcgcagatcctggactcgcgcatgaacaccaagtacgacgagaacgacaagctcatccgtgaggtgaaggtcatcacccttaagtctaagctggtcagtgacttccgcaaggacttccagttctacaaggtccgggagatcaacaactaccaccacgcgcacgacgcctacctcaacgcggtggtggggacggcgcttattaagaaatatcccaagctggaaagcgagttcgtttacggcgactacaaggtgtacgacgtccgcaagatgatcgcaaagtcggaacaggaaatcggaaaggcgacggccaaatatttcttttactccaacatcatgaatttttttaagacggagatcaccctggcgaacggggagatccgcaagcggcccctcatcgagaccaacggggagacgggcgagatcgtctgggacaagggccgggacttcgccaccgtgcggaaggtgctttctatgcctcaagtcaatatcgtcaaaaagacagaggtgcagaccggcgggttcagcaaggagtctatcctgccgaagcgcaactcggacaagctcatcgcgcgcaagaaagactgggaccccaaaaaatatggcgggttcgactcgccgaccgtcgcctacagcgtcctcgtggtggctaaggtcgagaagggcaagagcaaaaagctaaagtcggtgaaggagctgctgggcatcaccatcatggagcgctcgtctttcgagaagaatccaatcgacttcctagaggcgaaggggtacaaggaggtcaaaaaggatcttatcatcaaactgccgaagtacagtctgttcgagctggagaacgggcggaagcggatgctggctagtgcgggcgagttgcagaagggcaacgagttggcactgccctccaagtacgtgaacttcctgtacctggcctcccactacgagaagctcaaggggagccccgaggacaacgagcagaagcagctattcgtcgagcagcacaagcactacctggacgagatcatcgagcagatcagtgagttctccaagcgggtcatcctcgcggacgccaacctggacaaggtgctgagcgcgtacaacaagcacagggacaagccaatcagggaacaggccgagaacatcatccacctgttcaccctgaccaacctgggtgcaccggctgccttcaagtactttgacacgaccatcgaccggaagcgctacacctccacgaaggaggtgctggacgccacgctgatccaccagagcatcaccgggctctacgagacacggatcgacctgagccagcttggcggggac

SEQ ID NO: 66 - DNA, 4092 bp, Artificial sequence
  Synthetic polynucleotide
gacaaaaagtattccattggactcgctatcggcacgaacagcgtcgggtgggcggtcatcactgacgagtacaaggtgccgagcaagaagtttaaggtgctgggaaacaccgacaggcactcgatcaagaaaaatcttatcggggccctactcttcgactccggagaaaccgccgaggccacccggttgaagcgcacggcccgccgtcgctacaccaggcgcaagaaccggatctgctacctccaggagatattcagcaatgagatggcgaaggtggacgactcgttttttcacaggctagaggagtctttcctcgtggaggaggacaagaaacacgagcgccaccccatcttcggcaacatcgtggatgaggtggcatatcacgagaagtacccaaccatctaccacctccgcaaaaagctcgtggactctaccgacaaggccgacctccgtctgatctacctcgcgctggcccacatgattaagttccgaggacactttctgatcgagggcgacctgaacccagacaacagcgacgtggacaagctgttcatccaacttgtccagacctacaatcagctcttcgaggagaaccctatcaacgcctcgggcgtggacgcgaaggccatcctgtccgcccgcctgagcaagtcgcggcggctggagaacctgatcgcccagctccccggcgaaaaaaagaacggcctcttcggcaacctcatcgcgttgtcgctggggctcaccccgaacttcaagtccaacttcgacctggccgaggacgctaaactccagctctcgaaggatacctacgacgacgacctcgacaacctgctggcccagatcggcgaccagtacgcggaccttttcctggcggccaagaacctgagcgacgcgatcctccttagcgacatactccgtgtgaacaccgagatcacgaaggccccgctctccgcgtccatgattaagcgctacgacgagcaccaccaagaccttaccctgcttaaggcgctggtcaggcagcagttaccggagaagtacaaggagatcttttttgatcaatctaagaacggttacgccgggtacatcgacggcggcgcgtcccaggaggagttctacaagttcatcaagccgatcttggagaaaatggacgggaccgaggagctgctcgtgaagctcaaccgcgaagacctcctccgcaagcagcgcaccttcgacaacgggagcatcccgcaccagatccacctgggagagctgcacgcgatcctgcggagacaagaggacttctaccccttcctcaaggacaaccgggagaagattgaaaaaatacttacttttcgtatcccgtactacgtcgggccccttgcgaggggcaactccagattcgcgtggatgacccgcaagtccgaggagaccatcaccccgtggaacttcgaggaggtggtggacaagggcgcgtcggcccagtcgttcatcgagcgcatgaccaacttcgacaagaaccttccgaacgagaaggtgctcccgaagcacagcctgctctacgaatattttactgtgtacaacgagctgacgaaggtcaagtacgttacggaggggatgaggaagcccgccttcctctccggcgagcagaagaaagccattgtggatctcctgttcaagaccaaccgcaaggtgacggtgaaacagctcaaagaggactacttcaagaagatcgagtgcttcgactccgtagagatcagcggggtcgaggaccgcttcaacgcctcgctgggcacgtaccacgacctgctaaagattatcaaggacaaagacttcctagacaatgaggagaacgaggacattctggaggacatcgtgctgactctgacgctgttcgaagaccgcgagatgatcgaggagcggcttaagacgtacgcccacctgttcgacgacaaggtgatgaagcagttgaaacggcggcgctacaccgggtggggccgcctctcccgcaagctcatcaacggcatccgcgacaagcagtcggggaagacgatcctggacttcctcaagagcgacggcttcgccaaccgaaacttcatgcagctaatccacgacgacagcctgacgttcaaggaggacatccagaaggcccaagtgagcggccagggagactcgctacacgagcatatcgccaacctggctggcagcccggcgattaagaaaggaatcctccaaaccgtcaaagtggtggacgagctggtgaaggtgatgggccgccacaagcccgagaacattgtgatcgagatggcgcgggagaaccagacgacgcagaagggccaaaaaaatagcagggaaaggatgaagcgaatagaggaggggatcaaggagctggggagccagattctcaaagagcacccggtcgagaacacacagctccagaacgagaagctgtacctctactacctccaaaacggccgcgatatgtacgtggaccaggaactagacatcaaccggctgagcgactatgacgtggaccacatcgtgccgcagtccttcctcaaggacgactcgattgacaacaaagtgctcactagatccgacaagaacagaggcaagagcgataacgtcccgtcggaggaggtcgtcaagaaaatgaaaaactactggcggcagctcctaaacgccaagctcatcacgcagcgtaagttcgacaacctgacgaaggcggagcggggcgggctgagcgagctggacaaagcggggttcatcaagcggcagctcgttgagacgcggcagatcacaaagcacgtcgcgcaaatcctcgactcccgcatgaacaccaagtacgacgagaacgacaagctcatccgggaggtgaaggtcattacccttaaatcgaagctcgtcagcgactttcgtaaggacttccagttctacaaggtcagagagatcaacaactaccaccacgcccacgacgcctatctgaacgccgtggtgggcaccgcgcttattaagaagtaccccaagctggagtccgagttcgtgtacggcgactacaaggtttatgacgtcaggaagatgatcgccaagtcggaacaggagatcggaaaagctaccgccaaatatttcttctatagcaacatcatgaacttcttcaaaaccgagatcaccctcgccaacggcgagatccggaagcgcccgctcatcgagaccaacggggagaccggggagatcgtctgggacaaggggcgggacttcgctactgtccgaaaggtgctctccatgccacaagtgaatatcgtcaagaaaacagaggtgcagaccggagggttcagtaaggagtccatcctgcccaagcggaactccgacaagctaattgctcgcaaaaaggattgggatcctaaaaaatatggcggcttcgactcgcccacggtcgcctactctgtgctggtcgtggcgaaggtggagaagggcaagtccaagaagctcaagagcgtcaaggagctgctggggatcacgatcatggagcgtagttcgtttgagaagaatcccatcgacttcctggaggctaagggctacaaggaggtcaaaaaggacctcatcattaagctgccgaagtacagcctcttcgagctggagaacgggcggaagcgtatgctcgcctccgctggggagttacaaaaggggaacgagctggcgctgccgtctaagtacgtcaacttcctgtacctggcctcccactacgagaagctcaaggggtcgccggaggacaacgagcagaagcagctcttcgtagagcagcacaagcactacctggacgagatcatcgagcagatttcagagttctcaaagcgggtcatcctcgccgacgccaacctggacaaggtgctctcggcctacaacaagcaccgggacaagccgatccgcgaacaggccgaaaacatcatccacctgttcacgctcaccaacctcggtgccccggcggccttcaagtactttgacacgaccatcgaccggaagcgctatacctcgacgaaggaggtgctggacgccaccctgatccaccagtccatcaccgggctttacgagacccggatcgacctctcgcagcta

SEQ ID NO: 67 - DNA, 4101 bp, Artificial sequence
  Synthetic polynucleotide
gacaagaagtatagtattggactcgccatcggaaccaactctgtggggtgggctgttattacagatgaatataaggtgccatccaaaaagtttaaagttctgggcaatactgatagacactcaatcaagaagaatctgataggtgcacttctgtttgatagtggagagactgccgaggcaaccagacttaaaaggactgcaagaagaagatataccagaagaaagaataggatttgctatttgcaggaaatcttcagcaacgaaatggccaaggttgatgactcatttttccataggttggaggagagttttcttgtggaggaagataagaagcacgaaagacacccaattttcgggaatatagtggacgaggtggcttatcatgagaagtatcccactatctaccacctgagaaagaaacttgtggactcaaccgataaggctgatcttaggcttatatacttggcccttgcacatatgatcaaattcaggggccattttcttatcgaaggcgatcttaatcccgataactcagatgtggacaagctgtttatacaacttgtgcaaacctacaatcaactcttcgaggagaatcccattaacgcctccggcgtggatgcaaaagccatactgtcagccagactgagcaaaagtaggagactggagaatcttatagcccaactgcccggtgaaaagaagaatgggctcttcggaaatctgatcgctctttcattggggttgacacccaactttaagagtaactttgacttggcagaagatgcaaagttgcagctcagtaaagacacatatgacgatgaccttgacaatctcttggcacaaataggggatcaatacgctgaccttttcctcgctgccaagaacctcagcgacgctatactgttgtccgacattcttagggttaataccgaaattacaaaggcccctcttagtgcaagtatgatcaaaaggtatgatgagcatcaccaagaccttacactgctgaaggctctggttagacagcaactccctgaaaagtataaggaaatattcttcgaccaaagtaagaacgggtacgccggttatattgatgggggcgcaagtcaagaagaattttacaaattcatcaagccaattcttgaaaagatggacgggactgaggaattgctggtgaaactgaatagagaggaccttcttagaaaacagaggacatttgacaatgggtccatcccacaccagattcatctgggggaactccacgcaatattgaggagacaagaagacttttacccattccttaaggataatagagagaaaatcgaaaaaatcctgactttcaggattccttactatgttgggccactggccagggggaactcaagattcgcttggatgacaaggaagtcagaagaaaccataaccccttggaattttgaagaggtggttgataagggggcatcagcccagtctttcatagagaggatgaccaactttgataaaaatcttccaaatgagaaggttttgccaaaacatagtcttttgtacgagtactttactgtttataacgaattgaccaaggtgaagtatgtgaccgagggaatgaggaagccagcatttttgtccggggagcaaaagaaagcaatcgttgatcttctcttcaagaccaacagaaaagtgaccgtgaaacaactgaaggaagactacttcaaaaagatagaatgtttcgattcagtggaaattagcggtgttgaagacaggttcaatgcttcattgggtacttaccacgacctgttgaagataatcaaagacaaggactttctcgataatgaggagaacgaagacatcttggaagacattgtgcttacactcactttgtttgaggacagggaaatgattgaggaaagactcaaaacttacgctcatttgtttgatgataaggttatgaaacaactaaaaagaagaaggtacaccggctggggaagattgagtaggaaactgatcaacggtattagagataaacaatccggaaagactatcctcgatttccttaagagtgatggctttgcaaataggaattttatgcagctgattcatgacgactcacttaccttcaaagaagacatccaaaaagctcaggtgtctgggcaaggcgacagtctgcatgaacatatagctaacttggctgggagtcccgccatcaagaaggggatacttcaaacagttaaagttgtggacgaattggtgaaggtaatgggaaggcacaagcctgaaaatatagtgatagaaatggcaagggaaaatcaaacaacccagaagggacagaagaacagtagggaaaggatgaaaaggatagaagaggggatcaaagagcttggtagccagatcctcaaggaacatccagtggagaatacccaacttcaaaacgagaaactctatttgtactacttgcagaacggaagagatatgtatgtggaccaagagcttgatattaacaggctgagcgattatgacgttgaccacatagtgccccaatcattcctcaaggatgactctattgataataaggtgctgacaaggagtgacaagaatagagggaaatccgacaacgttccatccgaggaagttgtgaagaagatgaagaactactggaggcagttgctgaacgctaagctcattacccagaggaaattcgataacctgaccaaagcagagagaggcgggctgagcgaactcgataaagcaggtttcatcaagagacaactcgtggagactaggcaaattactaagcacgtggctcaaatactcgacagcaggatgaacacaaagtacgacgagaacgacaagctcattagagaggttaaggttattactctgaaaagtaaattggttagcgatttcagaaaggatttccaattctataaggttagagagatcaacaattatcatcatgcacatgatgcctatctgaatgctgtggttggtacagcccttatcaagaagtaccctaagctagagagcgagtttgtgtacggagattataaggtgtatgatgtgaggaaaatgatcgctaaaagtgagcaagagattggaaaggctaccgccaaatacttcttttattccaatattatgaatttcttcaagacagaaatcaccctggctaacggcgagataaggaagaggccgcttatcgaaactaatggggagacaggcgaaatagtgtgggacaaagggagggatttcgcaactgtgaggaaggttttgagcatgcctcaggtgaatatcgttaagaaaaccgaagttcaaactggagggttctctaaggaaagcattctccccaagaggaactccgacaagctgattgctagaaagaaagactgggaccccaagaagtatggcggattcgactcacccactgtggcatatagcgttctcgtggtggcaaaggttgaaaagggtaaatccaaaaaactcaaatccgtgaaggaactccttggcataactattatggaaaggagtagctttgaaaagaatcccatcgactttctcgaagctaagggctataaggaagttaagaaggaccttataatcaaacttccaaaatactccctttttgagttggaaaacggcagaaagagaatgttggccagtgccggggagcttcaaaagggcaacgaactggctctgcctagcaaatatgtgaactttttgtatctggcatcacactacgagaaacttaaaggctctcctgaggacaacgagcaaaaacagctctttgttgaacagcataagcactacctcgacgagattattgagcagatcagcgagttctcaaagagagttattctggctgacgctaatcttgacaaggttttgtccgcttacaacaaacacagggataagccaatcagggagcaggcagaaaacataatccatctctttaccctgacaaacctcggtgcccccgctgctttcaagtattttgatactaccattgacaggaagagatatacttccactaaggaagtgctcgacgcaaccctcatacaccaaagtatcacaggcctctatgaaactaggatagatttgtctcaacttgggggcgat

SEQ ID NO: 68 - DNA, 4101 bp, Artificial sequence
  Synthetic polynucleotide
gacaaaaagtattccatcgggcttgctatcggaaccaactctgtggggtgggcagttattaccgacgaatacaaggtgcccagcaagaagtttaaggttctggggaacacagatagacatagcataaagaaaaacctgataggcgcactgttgttcgactccggggaaacagccgaagctaccaggctgaagagaactgcaagaagaaggtacaccagaagaaaaaacagaatatgttatctccaagagattttctctaacgagatggccaaggtggacgactcattctttcacagactggaagaatctttccttgtggaagaagataagaaacacgagaggcaccctatttttggcaatatcgtggatgaggtggcttaccacgaaaaataccctacaatataccacctcaggaaaaaattggttgatagtacagacaaggccgacctcaggctcatctatttggccctggcccatatgattaaattcagggggcactttctcatcgagggagatttgaaccccgacaacagtgatgttgataagctctttattcagctcgtgcagacttacaatcagttgtttgaggaaaaccccattaatgcttccggggtggacgccaaggcaatcctttctgcaagactctcaaagtcaaggagactcgaaaatctgatagcacagcttccaggagagaagaagaacgggctctttggaaacctgatcgctctgtcactcggactcacacccaatttcaaaagcaattttgatttggcagaggacgctaagctgcaactcagtaaggatacctacgacgatgacttggataatctgctcgcacaaattggggaccagtatgcagacctgtttctcgcagctaagaacttgagtgacgccatattgctcagtgacatcctcagggttaataccgagattacaaaagctccactctctgcaagcatgatcaagaggtatgacgagcaccatcaagacctgacactccttaaggcgttggttaggcagcaacttcctgaaaagtataaggaaatcttcttcgatcaaagcaaaaacggctacgccggctatatagacgggggagcatcccaagaagaattttataagttcataaaacctatattggagaagatggacgggacagaggaattgctcgtgaaactgaacagggaggatctcctcaggaagcaaaggaccttcgacaatggctccatcccacatcagattcacctcggcgaactgcacgcaatactgagaagacaagaggacttttatcctttcctgaaggacaacagggagaaaatcgagaaaatcttgacattcagaatcccatactacgttgggcctctggccagaggtaacagtaggttcgcctggatgactaggaaatcagaggagactattacaccctggaactttgaagaagttgttgataagggagcttcagcacaatcattcatcgaaagaatgacaaactttgacaaaaatctgcctaatgagaaagtgctcccaaaacattccctgctgtatgagtattttaccgtttataacgagcttaccaaggtgaaatacgttactgaaggtatgagaaagccagcttttctttcaggggagcaaaagaaggctatcgtggatcttctctttaagaccaacagaaaggttaccgtgaagcagcttaaggaagactactttaaaaagatcgagtgttttgactcagtggaaataagcggtgttgaagatagattcaacgcatccttgggaacttatcatgatcttcttaagataatcaaggataaagactttctcgacaacgaggaaaacgaagatatactggaggacatagttctgacacttactttgttcgaggatagggagatgatcgaggaaagactgaaaacatatgctcaccttttcgacgacaaagttatgaaacaactcaagagaaggagatatacagggtgggggagattgagcaggaaactgattaatggtatcagagacaaacagtcaggaaaaacaatactcgactttttgaaatcagacgggttcgcaaataggaatttcatgcagcttatacacgacgattcacttacttttaaagaggacattcaaaaggctcaagttagtggacaaggtgactccctccacgaacacatcgcaaatctcgctggcagccctgcaattaagaagggtatactccagacagttaaggttgttgacgagctggttaaagtgatgggaagacacaaacccgagaacatagtgatagagatggccagggaaaaccaaaccactcaaaaagggcagaaaaattccagagagaggatgaaaaggattgaagaaggtatcaaggagctgggtagccaaattctgaaagaacatcctgtggaaaacactcaactccagaatgagaaactctatctgtactatctgcaaaatgggagagatatgtatgtggaccaggaactggacataaacaggctctcagattacgatgtggatcatatcgtgccacagtcctttcttaaggatgatagcatcgacaataaggtgcttaccaggtccgacaagaacaggggaaagtcagataacgtgccttctgaagaagttgttaaaaagatgaagaactactggagacagctgcttaacgctaagctcataacacagaggaagtttgacaacttgaccaaggccgagagaggcggactctcagaattggataaggcagggttcataaaaaggcagctggtggaaacaaggcagataactaaacatgtggctcagatcctcgatagtaggatgaatacaaaatacgatgagaacgacaagctcataagggaggttaaagtgataactctgaaatccaaactggttagcgattttaggaaggatttccagttttacaaagttagggagatcaacaattatcatcacgcccacgatgcctacttgaacgcagttgtgggtactgcacttatcaaaaagtaccctaagctggaatccgagtttgtttatggagactataaggtgtacgacgttagaaaaatgattgcaaagtcagagcaggagatagggaaagccactgcaaaatatttcttttatagcaatatcatgaatttctttaagacagaaatcacactggccaatggggaaataaggaagaggcccctgatcgaaactaatggcgagacaggggagattgtgtgggataaaggtagggactttgcaacagtgaggaaagtgctgagcatgccccaagttaatatcgttaaaaagaccgaggttcaaacagggggctttagtaaggaaagcattttgcccaagaggaatagtgacaaattgattgctaggaaaaaagattgggaccccaaaaagtatggcggatttgatagccccactgttgcttactccgtgctcgtggttgcaaaggtggagaagggaaagagcaagaaactgaagtcagttaaggaactccttggtatcactatcatggaaagaagctcctttgagaagaaccctattgacttcctggaggctaaagggtacaaagaggttaagaaagaccttatcattaaattgcccaaatatagtcttttcgagcttgaaaacggaagaaagaggatgcttgcatccgctggcgaattgcaaaagggcaatgagcttgctctcccttccaagtatgtgaacttcctttatcttgcctcacactatgaaaaactcaaaggttcacccgaagacaacgaacaaaagcaactatttgtggaacaacacaagcactacctggacgaaatcattgagcaaatttctgagttttcaaaaagggtaatcttggctgacgcaaatctcgacaaagttttgtcagcttacaacaaacatagagataagccaattagagagcaagctgagaatatcatccatctgtttaccctgactaaccttggagcgcctgctgcttttaaatatttcgacaccacaatcgacaggaagaggtacactagcactaaggaagttctcgacgccaccctcatccaccagagtattacaggcctgtacgagacaagaattgatctttctcaacttggtggtgac

SEQ ID NO: 69 - DNA, 4101 bp, Artificial sequence
  Synthetic polynucleotide
gataagaagtactcaatcggtctggcaatcggaaccaactctgtgggttgggcagtgattacagatgagtataaggtgccaagcaaaaaattcaaggtgctgggtaataccgacagacacagcattaagaagaatttgattggagcactcctctttgactcaggggaaacagcagaggcaacaaggctgaagaggacagcaaggcggaggtacacaaggcggaaaaacaggatatgctacctccaggaaatctttagcaacgagatggctaaagtggatgatagctttttccatagactcgaagaatcctttcttgttgaagaggacaaaaagcatgaaaggcatcccatcttcggcaatatagttgatgaggttgcataccatgagaagtaccccacaatctaccacctcagaaagaaacttgtggactccacagataaagcagacctgaggctcatatacctcgcactcgcacacatgatcaagttcagagggcactttctcatcgaaggtgacctgaatccagataattcagatgtggataaactgtttatacagctggtgcaaacatacaaccaacttttcgaggaaaacccaatcaatgcctccggtgttgatgcaaaggccatcctgtcagcaagactcagcaaaagcaggcggctcgaaaacctcatcgcccagcttcccggtgaaaagaagaacgggctctttggtaatctcatcgcattgagccttggtcttactccaaacttcaagagcaattttgatctggcagaggatgctaaactgcaactctcaaaggacacatatgacgatgaccttgacaatctgttggcccagatcggggaccaatatgcagacctcttcctggccgcaaagaatctgtcagatgcaatcctcttgtccgacatactgagagttaacactgagatcacaaaggcacctctgtccgcctccatgattaagagatacgatgagcatcaccaggatctgactttgctcaaagccctcgttagacagcagttgccagaaaagtacaaagaaatattctttgatcaatcaaaaaacggatatgcagggtacatcgacggtggggcaagccaggaagagttctacaaattcatcaaacctatcctggaaaagatggatgggacagaagagctgctggttaagctgaatagggaagacctcctcagaaagcagaggacatttgataacgggagcatccctcatcaaatccacctcggtgaactccatgctatcctgagaaggcaggaagacttttatccatttttgaaggacaatagggagaaaatcgaaaaaatcctgacattcagaatcccatactacgttggtcctctggcaagaggtaacagtaggttcgcatggatgacaaggaaaagcgaggagacaatcacaccctggaattttgaggaagttgttgacaagggtgccagcgcacaatcctttatcgaaagaatgacaaatttcgacaagaatctgcctaacgaaaaggttctcccaaagcattcactcctgtacgaatattttacagtttataacgaactgactaaagttaaatacgttaccgagggtatgaggaagccagcattcctttccggggaacagaagaaagctattgtggacctcctgttcaagacaaatagaaaagtgacagttaagcaactcaaagaggattacttcaaaaagatcgaatgttttgactctgtggagatcagcggggtggaggatagattcaacgccagcctgggtacatatcatgatctcctgaaaatcattaaagacaaggacttccttgacaacgaggagaacgaggacattctggaagacattgttctgaccctcacactctttgaggatagggagatgattgaggaaagactgaagacctacgcccacctctttgacgataaagtgatgaaacagctcaagagaagaaggtatacaggttgggggagactgagcaggaagttgatcaatgggattagggacaaacagtccgggaaaacaatcctcgattttctgaagtcagacggtttcgcaaacagaaattttatgcagctcattcacgatgacagcttgacattcaaggaagacatccaaaaggctcaagtgagcggccaaggggatagcctccacgagcatattgcaaatctggcaggttcaccagccatcaaaaagggcatacttcagacagttaaggttgtggacgaattggttaaagttatgggcaggcataagccagagaatatcgttatcgaaatggcaagggagaaccaaacaactcaaaaagggcagaaaaatagcagagagaggatgaaaagaatcgaggaagggatcaaggaacttgggtcccaaatcctcaaggagcacccagttgaaaatactcaactgcaaaacgagaagctctatctctactatctccaaaacgggagggatatgtatgttgaccaggagctggatattaacagactgtcagattatgatgttgatcatatcgtgccccagtcattcctgaaggacgattccatcgacaacaaagttctcacaaggtccgataaaaacaggggcaagtccgataacgttccaagcgaagaagtggtgaaaaagatgaaaaactattggagacaacttctgaatgcaaagttgattactcagagaaagtttgacaacctcacaaaagcagaaagaggcgggcttagcgaactcgataaggcagggtttatcaaaagacagctggttgagacaaggcagatcacaaaacatgtggcacagatccttgactcaaggatgaataccaagtatgatgagaatgataagttgatcagggaggttaaagttatcacactcaaatccaaactggtgtcagacttcaggaaagactttcaattttataaggtgagggagatcaataactaccaccatgcacatgacgcctacctgaacgcagtggtgggtacagcattgattaaaaaataccctaagctggagtctgagtttgtgtacggggactacaaggtgtacgacgtgaggaaaatgatagccaagtccgagcaggagatcgggaaagcaacagctaagtatttcttttacagtaatatcatgaatttctttaaaactgagattactctggcaaacggggagatcaggaaaagacccctcatcgagactaatggtgaaacaggtgagatcgtttgggacaaggggagggattttgctactgttagaaaagttctgagtatgccacaagtgaatattgtgaaaaagacagaagttcagacaggtgggttctccaaagaatccatcctgcccaagagaaattcagacaagctcatcgcaagaaagaaggactgggaccctaagaagtacggaggatttgacagccccaccgtggcctattccgtgcttgttgtggcaaaggtggagaaagggaagagcaaaaaactgaaatccgtgaaagaactgctgggaattaccatcatggaaagaagctcctttgagaagaacccaatcgacttcctggaagcaaaaggatataaggaagtgaaaaaggacctcattatcaagctcccaaaatactcacttttcgagttggagaacggtagaaagaggatgctggcaagcgcaggggaacttcagaaaggcaatgagctggcattgccatcaaagtatgtgaacttcctctacttggccagccattacgagaaacttaaaggtagcccagaagataacgagcaaaaacagctctttgtggaacagcataagcattatctggatgagatcatagaacaaatctcagagttttccaagagagttatcctcgcagatgcaaacctggataaggttctctcagcctataataagcatagagacaagccaattagagagcaagcagagaacattatccacttgttcactcttacaaacctgggggcaccagccgccttcaaatatttcgatacaacaatagacagaaagaggtataccagcaccaaagaagttctcgacgccacactgatccatcaatcaatcacaggcctttacgaaactaggatcgacttgtcacaactgggtggggat

SEQ ID NO: 70 - DNA, 3307 bp, Artificial sequence
  Synthetic polynucleotide
gagcaaggacacctacgacgacgacttggacaacctattggcccagataggtgaccagtatgcagacctcttccttgcggccaagaacttgagtgacgctatactgctcagtgacatcctgagggtgaacactgagatcactaaggcccctctctctgcctcaatgattaagcgttacgacgagcatcaccaggatctcaccctgcttaaggcccttgttcggcagcagctccctgagaagtacaaggagatattttttgaccagtctaagaacggctacgccggttacattgacggtggggcaagccaggaggagttctacaagttcatcaagccgatccttgagaagatggacggcaccgaggagctacttgtcaagttgaaccgggaagacctgctccggaaacagcgtacattcgacaacggcagcatccctcaccagatccacctgggcgaactacacgccatcctccgacgtcaggaggacttctatccattcttgaaagataacagggaaaaaatcgaaaaaatacttacgtttcgaataccttactacgtggggccccttgctcggggaaactccagattcgcatggatgaccaggaagtcagaggagaccatcacaccctggaactttgaggaggtggttgacaaaggtgcttctgcccagtccttcattgagcggatgactaacttcgacaagaacctgcccaacgagaaggtgctgccaaagcacagcctgctctacgaatactttactgtgtacaatgagctgacgaaggtgaagtacgtgacagaggggatgcggaagcccgctttcctgagcggcgagcaaaaaaaagcaatcgtggacctactgttcaagaccaaccgaaaggtgacagtgaagcagctcaaggaggactacttcaaaaaaatcgagtgcttcgactctgttgagataagcggcgtggaggaccgattcaacgcctcattgggaacctatcacgacctgctcaagatcattaaggacaaggacttcctggataatgaggagaatgaggacatcctggaggatattgtgctgacccttactctattcgaggacagggagatgatcgaggagcgactcaagacctacgctcacctgttcgacgacaaggttatgaagcaattgaagcgtaggcgatacacggggtggggaagactctcccgaaaactgataaacggcatcagggacaagcagtcagggaagacgatcttggacttcctgaaatccgacgggttcgccaaccgcaacttcatgcagctcattcacgacgactcactaacgttcaaagaggacattcagaaggctcaagtcagtggacaaggcgactccctgcacgagcacattgcaaaccttgcgggctccccggcgattaaaaagggcattctccaaacggttaaggtggtggacgagctggtgaaggtgatgggccgacacaagcctgagaacatcgtgatcgagatggccagggagaaccagactacccagaagggtcagaagaactctcgggaacgtatgaagcgtattgaggaggggattaaggagttgggctctcaaatcctcaaggagcaccctgtggagaacactcagctccaaaacgagaagctgtacctgtactacctgcaaaacgggcgcgatatgtacgtggatcaggagttggacatcaacaggcttagcgattacgacgtggaccacatcgtgccacagtcattcttaaaggacgacagcatcgacaacaaggttctgacgaggagcgacaagaatcgagggaaaagtgacaatgttccatccgaggaggtggtcaagaaaatgaagaactattggcgtcagcttctgaacgccaagctcatcacccagcggaaattcgacaacctgactaaggctgagcgaggcggactctccgagcttgacaaggctggcttcatcaagcggcagttggtcgaaacccgacagataacgaagcacgttgcccagatacttgactcccgtatgaacaccaagtacgacgagaacgacaagctcatcagggaggtgaaggtcattacccttaagtccaaactcgtcagcgactttcgtaaggacttccagttctacaaggtgcgcgagatcaataactaccaccacgcacacgacgcctacctgaacgcagtggttggaaccgcgttgattaaaaagtaccccaagttggagtcggagttcgtttacggggactacaaggtgtacgacgttcggaagatgatcgccaagtctgaacaggagatcgggaaagcaaccgccaagtatttcttctatagcaacatcatgaacttctttaaaaccgagatcacacttgccaatggcgagatccgtaagaggccgctgatcgagacaaatggggagactggcgagatcgtgtgggacaagggccgcgacttcgcaaccgttcggaaagtcttgtccatgcctcaagtcaacatcgtcaagaagactgaggtgcaaacaggcgggttctcgaaggagtccatactgcccaagaggaactcagacaagctcatagcacgcaaaaaagactgggatccaaagaaatacggcgggttcgactcgccgacagtcgcatactccgtgttagtggtggctaaagtggaaaaggggaagtccaagaagctcaagtccgtcaaggagttgctcgggatcaccattatggaacggtcctcattcgagaagaatcccattgacttcctagaggcgaagggctacaaagaggtcaaaaaggacctaattattaagctccccaagtattcactcttcgaacttgaaaatggtcgtaagcggatgttggcaagcgctggagagcttcagaaggggaacgagcttgcactgccttccaagtacgtgaacttcctgtacctcgcctctcattacgagaagttgaagggctcaccggaggacaacgagcagaagcagttgttcgtggagcagcacaagcactacctcgacgagatcattgagcagataagtgagttcagcaaacgggtgatccttgccgacgctaacctggacaaggtgctgagcgcctacaacaagcacagagacaagccgatccgagagcaagcggagaacatcatacacctgttcaccctcacgaacctcggggctcccgcagccttcaaatattttgacacgaccatcgaccgtaaacgctacactagcacgaaggaggtgctggacgctacccttatccaccagtccatcaccggcctgtacgagacgagaatcgacttgtcgcagctcggtggtgac

SEQ ID NO: 71 - DNA, 4101 bp, Artificial sequence
  Synthetic polynucleotide
gacaaaaaatactcaattggtctggcaattgggaccaacagtgtcggatgggccgtgattaccgacgagtacaaggtgccgtccaaaaaattcaaggtgcttgggaacaccgaccgccactcgatcaagaaaaacctaatcggtgcgttgcttttcgacagtggggagaccgccgaggcaacacgcttaaaacgcacagctaggaggagatatacacggcgcaagaaccgaatatgctacttacaggagatattctccaatgagatggcgaaggtggacgactctttcttccatcggcttgaggaatccttcctggtcgaggaggacaagaagcacgagcgacacccgatattcgggaacatcgttgatgaggtggcgtaccacgagaagtacccaacgatataccacttacgcaagaagctcgtggactctacggacaaggccgacttgcgccttatctacttggcactggcccacatgattaagttccgaggccacttccttatcgagggtgacctgaaccccgataactccgacgtggacaagctcttcatccaactcgtccagacatacaaccagctattcgaggagaatcctatcaacgcctctggggtggacgctaaagctatcctctcagcccgcctgtcaaagtcgaggaggttggagaacctaatcgcccagcttccaggcgagaagaaaaatgggctgttcggaaaccttatcgcactctcactgggcctaaccccgaacttcaagtccaacttcgacctggcagaggacgcgaaattgcagttgtcgaaagacacctatgacgatgacctggacaacctgttggcccagataggggaccagtacgccgacctgttcctagcggccaagaacctgtccgacgccatcttgctgtcggatatactgcgggtgaacaccgagatcactaaagcacctctctccgccagcatgattaagcgttacgacgagcaccaccaagatttgaccctgctaaaggcacttgtacggcagcagcttcccgagaagtacaaggagatctttttcgaccaaagcaagaacggctacgccgggtacatcgacggaggtgccagccaggaggagttctacaagttcattaagcccatcctggagaagatggacgggactgaggaactacttgtgaagctgaaccgggaagacttactacggaagcagcgtaccttcgacaacggttctatcccacatcagatccatcttggggagttgcacgcgatcctgcgacgccaggaggacttttaccccttcctgaaagacaaccgcgagaaaatcgagaagatactgaccttcagaataccttactacgtcggaccccttgcgcgaggcaactcaagattcgcgtggatgaccaggaaatcagaggagaccatcacaccctggaatttcgaggaggtggttgacaagggtgcctccgcccagtcctttatcgaacgaatgaccaacttcgacaagaacttgcccaacgagaaggtgctccccaaacacagcctcctctacgaatatttcacagtgtacaacgagcttactaaagttaagtatgttactgagggcatgaggaaacccgccttcctgtcaggcgagcagaagaaagctattgtggacctccttttcaagaccaaccggaaggtgacagtgaagcagctcaaggaggactacttcaagaagatagagtgcttcgacagcgtggagatcagcggggtggaggacagattcaatgcctctctcggaacataccacgacttgcttaagatcatcaaggacaaggacttcctcgacaacgaggaaaacgaggatattctggaggatattgttctgactcttaccctgttcgaggaccgggagatgatcgaggagcgtctcaagacctacgcccacctgttcgacgacaaagttatgaagcagctcaagcgtcggagatataccggatggggccgtctgtctcggaagctcatcaacgggatcagggacaagcagtcagggaagacgatcttagacttccttaagtctgacggcttcgccaacaggaacttcatgcagttgatccacgacgacagccttaccttcaaggaggacatccagaaggcccaagtgagtggccagggtgacagcctccacgagcatattgctaatcttgcgggttccccagcgattaaaaagggcatacttcaaaccgttaaggtggtggacgagcttgtcaaggtgatggggcgacacaagcccgagaacatcgtgatcgagatggccagggagaaccagaccacccagaaggggcagaagaatagccgagaacgcatgaagcgcatcgaggaggggattaaggagctagggagccagatcctcaaggaacatcccgtcgagaacacccagctccagaacgagaagctatacctctactacttgcaaaacgggagggatatgtacgtggatcaggagttggacattaaccgcctaagcgactacgacgtagatcacatcgtgcctcagtcattcctcaaagacgacagcattgacaacaaagtcttgacccgatccgacaagaaccgaggaaaatccgacaatgtgccctcagaggaggtcgtcaagaaaatgaagaactattggaggcagctacttaacgccaaactcataacccagcggaagttcgacaacctgacaaaggctgagcggggtgggctcagcgagcttgacaaggctggcttcatcaagcggcagttggtggagacaagacagataacgaagcacgtggctcagatcctggactctcgcatgaacacgaagtacgacgagaacgacaaattgatccgcgaggtcaaggttattacgctcaagagcaaacttgtcagcgatttccgcaaggacttccagttctacaaggtgagggagattaacaactaccaccatgcacatgatgcctacttgaacgcagtggtggggaccgcgcttattaaaaagtaccctaagttggagtcagagttcgtttatggggactacaaggtgtacgacgtccggaagatgattgcaaagtctgaacaggaaatcgggaaggccaccgccaaatatttcttctacagtaacattatgaatttttttaagactgaaattactctcgcaaacggcgagatcaggaagcgtcccctcatcgagacaaacggggagaccggggagatagtctgggacaaggggcgggacttcgctacggtgaggaaggtgctctcgatgccacaagtgaacatcgtcaaaaagacagaggtgcagaccggtggcttctcaaaggagtcaatcctgccaaaacgtaacagcgacaagctcatcgcccgcaagaaagactgggaccctaagaagtatggtgggttcgactcaccgacggtcgcatactccgttctggtcgtggcaaaggtggaaaagggcaagtccaaaaaactgaaatccgtgaaggagttgcttggcattaccatcatggaacgcagcagcttcgagaagaaccccattgacttcctggaggctaaagggtacaaggaggtcaagaaagatttaattattaagctacctaagtacagcttgttcgagctggagaacggccgaaaacgaatgctcgcatccgccggggaacttcaaaagggcaacgagcttgcgctgccctccaagtacgtgaacttcctgtacttggcatcccactacgagaaactcaagggtagcccagaggacaacgagcagaagcagctattcgtggagcagcacaagcactacctcgacgagataatcgagcagatcagtgagttcagtaagcgggtgatactcgcggacgccaacttggacaaggtgcttagtgcctacaacaagcaccgtgacaagcccatccgagaacaggctgagaacatcatccaccttttcactctgacaaacctcggtgctcccgccgccttcaaatacttcgacactaccatcgacaggaagcgctacacatctacgaaggaagttcttgacgctacgcttattcatcagtctatcacagggctgtacgagacaaggatcgaccttagccaactcggcggggat

SEQ ID NO: 72 - DNA, 13170 bp, Glycine max
gcttaataatagaagagtaatgggacagtgatgcttgtgtgtagatatgagtaaaataagagtacatgtgatgacaatataaataaggttgaatgctacaaaggtaaatagaaaataatccattttattttatttattatacataaatgataattaaaatataattcaaatgttattttcttttccttttctaattaaacccaattaaaatatttcttcttcttttatttactcacaaaaaatatatttccataactaccctcacacttcttcttttatatatatatatatatatataaagataaaaattaagtatcgaaacaaaactgattcacagtatttattttaagtaattatagaaaatatagaagaaataatgatttgatttatcattggcaatacatttttctatttttttaaaaattatcaaaaatattttttaatgactcaatctaattatctaatccaacccaatcaattgaattggattgctaaaaaaataaatgcaactaaacctaattcaattatgtttaattgagttatattgtaaactagaagtgtttccaatgtattttgtacatgcagttacataatataaagaaagagagcaaatgcaatacagtacaaaacataaaattacttatattgcataacaaagtaacacgtgtaatgtagttggatagattttatatatatgttgagatatatatgttgagattagattaaatttaactcaatccacttatatctgtaatttttgtcttatattttatctaaaatttgtattataaataatttaatatcttatatttgagtcaattataatttaattttaatgtgcctccaatattagttatgctggtgtctattgaaacgccgaggccgagggatcgaagtgtacctacacgccacactgcaagagtgtcgccaagttgggtttgatgaacgaaaatgaccaatccatccaacaaaattttaattaattttcaataataataataaaaaaaggcaaagaaagttacgcacaaaagcctcgttttgttctgtccctttattccttccttcctttcttcttcttccttacctctttccctggctgatttagggttttctggcaataatctcctttcggtactttttacctctgaatcctcatcatcgctattgctgattacactcctcacaatgctcactcaacgcctcgttcgaaaaacgtgaaatcttctcttctgcaatttctagggtttcgaattgcggaaccgattcattcaactcaacaccacaaagactcgatcgatccatggtagcgttgtgattggcgctcggtggcgagcgagttgatagattgcgggttggctggattttgtatggaaactcggagccggaagcgggcggaggcttcctcagctgccccttcatccccttcctctggtcccaccactcgttcaagcaagcgcgcacgtctctcttcttcttcttccgcttccgccgccgtgaacactcggtcccgtgcatccaatactaaggaacccttgccccctaaaaatccccctcctcctcttcctcccatggactctgccaacgaatcctctggctcccgccgtgatcgccgcaacaacaaagaaaactcctccgacaaggggaaggagaaagagcatgatgtcaggattagggacagggatgcggcattgaacatggatggcagtggtggagacgaggacgatgacaatgacaatgacagtgaaggcggtgtggggattttgcatcaaaacttgacctctgcgagtagtgcacttcaggggcttcttcggaaactcggtgctggtttggatgatctgcttccatcgtcggctatgggctctgcatcttcctctcaccagagtgggaggctgaaaaagatcctctttggattgcgggctgacggcgaagaagggcggcaggtcgaagcattgacacagctctgtgagatgctttcgattgggactgaagaatcgcttagtacattctctgttgattcgtttgttcctgtgctcgtggggttgttgaatcacgagagcaaccctgacatcatgcttcttgctgccagagcattgacccatctctgcgatgtgctcccttcatcttgtgctgcggttgtgcattatggtgcagtctcaatcttttgtgccaggttgctcacaatagaatacatggacttggctgagcaggttgttctttaatgggaatggtgttagaagaaacttatgaaatataaatatttgtcttgaactctggtgctgcctaattgttttttaaaactatgtatattgcaatgtttctgggttcagttgtagaagaatcatgcattttgaaaatgaaattcttatagtttgattactgtgtttgatggcatgaacagtcccttcaagctttgaagaagatctctctggagcatcccactgcctgcctacgagcaggtgctcttatggccgtgctttcttatttggacttcttttcaacaggagttcaggtaaattgtcagtgaagtacctaaatttagaggatgattatattatatggtccttttggatagtcataaatcatttggccacagatgcctttagtgagcaagtgtgtgtatgttgacattattctttgtttcagcgggttgcattgtctactgctgcaaatatgtgcaagaagcttccttcagatgcagctgattttgtgatggaagctgttcctcttctgacaaaccttcttcagtaccatgattccaaggtaaggtcatgttttttgttttaagtcttgtcacataatggaaactgtatttttccttttgcatctataacttttcccgttaaggaagttttttttagcttgagaggagggagattttgatccctgtatcccatagtataaaatatttttctatagcttcaccttatgcattatcaatttttgtaggttctggagcacgcctctgtttgtttgactcgaatagctgaagcttttgcatcatctccagacaaattagatgagttgtgcaaccatggacttgtaacacaagctacctccctcatttctaacagcagttctggaggtggtcaggcttctctcagcacaccgacatataccgtgagtgcaatttttactttaagtcggatgcattttgcatgtagttttggtccttgacttgggcatatgcagggtttaatccgacttctttcaacttgtgcgagtggatccctcttggagctaaaaccttattacttcttggaattagtggtattcttaaagatattctatctggttctggagtttcttctaatgcctctgtttctctgcattaagtaggccaccagaacaggtatagtataacaccagaacttttcttttagtcattcatgtgtagttttatctcgtaatgttcattaagcagcctttgaccttaaatacaccattatttagatccttgatatttccagttctcttacatttgtgaaggaatgaaattattctaattctctgtttcaaatatatagatatttgagattgtaaacctggcgaatgagcttctgcccccattgccacatggaacaatttctctccctatcatctccaacatgtttttgaaagggcccattgtaaagaagtctccttctggtagctctgggaaacaagaagacactaatggaaatgttcctgagatatcggctcgtgagaaactattaaatgatcagcctgaactacttaagcaatttgcgatggatctcctcccagttttaatacaggttgacatttgtgcattgatcatttgcttaaattttgcttgataaatttgttaaattaaaaaagaagttctgatattgctcctttgcttccttatttatcttctttggttaattgatggtattggcttgcttttgatacagatatatggttctagtgtcaatggtcctgttcggcacaaatgcctttctgtcattgggaaattgatgtatttcagcacggcagagatgatccagtctttgttgagtgtgacaaatatatcaaggtatgtagaagtttaattgggttgatattgcttgatatcctactgattttatgggtttagaaaatttatgcattgttgctttgatcatatagtttcttagctggcgtcctagcatggaaagatccacatgttttgcttcctgccttgaaaattgctgaaattcttatggaaaagcttcccgggacattctccaagatgttcattagagaaggtgttgtgcatgcagtggaccaacttattttagcctcaaattcaaccaatatctctacacaggcatctcctgctgagaaggataatgattctatatctggagcatcatctcgctctaggcgttatcggcgacggagtgggaattccaatcccgatggaaatcctttggacgatttgaaaactccagtttcagtaaatgttggttcacctccaagttctgtggatatgccaacattaaattccagtattcggttatctgttagtacagctgccaaagcttttaaagataagtactttccttcagatcctggggctgctgaagtgggtattactgatgatcttttgcatctgaaaaatctttgcatgaagttaaatgctggtgatgatgaacaaaggactaatggaaagggggaatctaaaacttctggatttggtccggaagagtatttaattgggatcatagctaacatgctaaaggaacttggcaaaggagatggtgtatctacttttgaattcattggtagtggtgttgttgcagctctgttgaattatttttcttgtgggtatttctctaaagatcgaccattagaaacccaccttcccaagcttcgccaacaagcacttacaaggtttaagttatttatagcagttgcactaccttctactattgaagttgggactgtggctcctatgactgtcttggtccagaagcttcaaaatgccttgtcctccttggagcgtttccctgttgtgctgagtcattcatctaggtcatctagtgggagtgcacgcctctcctctggactaagtgctttatctcagcccttcaagttgcggctttgtcgagcccagggtgaaaagtcacttagggattattcatccaacgttgtactggttgatccattagcaagtttagcagcgattgaggaatttgtttggcctcgtatccaacgtagtgaatctggtcagaagtccactgtagccactgggaattctgaatctgggacaactcctgcaggagctggtgtatcctctcctactacccgtcgccattctactagatccagatcatctgttaatataggtgatacatctagaaaggaaataactcaagataaaagtacaagttcttccaagggtaagggaaaagttgtattaaagcctgcacaagaggaggcaagaggacctcagaccagaaatgctactcgcagaagagcagctcttgataaagatgctcaaatgaagcctgtaaacgctgactctacttctgaggtataccgatgtaaactgagttagggactgttatgacagttatctgtagagaataactgctttagaaatcaatgttagaaactcaaatatctgtcttagaaaacagtactgtattagaaacttcaggatagtagttatgtatttggagtatatgtctgttagtatgtggttttaattaggcagtttaaagttatttttaagttcgtggacagagaatactctgtaggagacttctgtctctgggacagtaagtgctgtttttgtatgtgataggagactctagtctttagtacagcaaatgtattgctgtatttgtatgtgataggaaacttttgtctctgggacagcaagtgtattgctgtattgtgtgtgatttaagtgttctatatattttaggcaaatgctagggcgctgtttgaggaagtaaaaagggaaagttttttattgggatgcgtaaaatgcactccccctatattttatttctttactttatcatttggtgttctatcatatactttgaaatcctagcgatgagtttacaatgctacaacttttttcttctgttaatttataactttcagttatttagtttttgttggatggttttcttcttttgctctccacttccttctggctatgtatgatctgactatgaatgttgctgttttcatgttggtttatacagtgaaatatgaggagaatacttaataatgccaatataaggtgtaaagatgcattattagattttgcatcgcaagcttgaaaagtcatctggaatttctctgcaactttggacacactggattttgttgtctgtagatccttgaaatgttttacctctgccatttagttttataaatggcttttggttacaattatctatttagatatatctcttatgtgagaaacactacctaagtgttcttttgattattatgttgaacagttgcttttttgcaccattgatttctttacatacattaaaattaagctgttataagatttccctgcaaaagtgttgagttactacaaaagtgaggaacattgccaagcctcatccttctagcattaagtgtatgtgtcaggattgttttagattatttgtgggtgggttgcatattttttctatttaggttatacttgttttgtttttcattgcttttgattatggcagtgtttacatgcatgttgtttagctaggttcttgtggttgttaaactggtggaaggatctttagagtataaaatacaacacacattctatatgcagttgatagggctcaacttggctgctaaactcatctttttactgctatgctttggactaaatcatgaacctaatccaagtatcctgaagtatctaaatattagtctcttgttttttcttttctttttttacccttctattgacatttttcattgtctacattgtaggatgaagatttggatatatcccctgttgagattgatgaggcattggtgattgaagatgacgatatttctgatgatgaagatgatgaccacgaagatgtatgttatctactgttttgtctacttttcttacttggtgatgagtatcacatttaagtaattactgtgttactgtaatttttttttttgcttttctgacaacccccagctttttctacgtttaacacggcttttaatatattaaaatctatttttggctaccaacgctggtgtccttcaatcttgtttacatttttttcaaaatgatatgctgctgtctttgtatcatttctttgctttctattttttcttctgggtataatgatgcaatgaagttttagtttatgatcttatgcgaactatccaagcctctgaccaatagctcaatctaggtgttttatttccaaaattttaattttagctaccatcattattgttaaccaagattgaatgttatagttaaattcagttgtatctattcttaaaatattggtgcttgttttatttttattgatgcaggtactgagggatgattctcttcctgtttgttcacctgacaaagtacacgatgtgaaattaggcgacttagcggaggagagtaatgttgctcctgcaacaagtgatggccaggctaatgctgcctcaggttctagtagcaaagctggtacagtcaggggatcagactctactgattttaggagtggctataactcaagctcaagaggtgcaatgtcatttgctgctgctgctatggctggacttggatctgccaatagcagaggtatcaggggtggaagagatcgactagggcgtccattgtttggtagttctaatgatcctccaaagttgatatttactgctggtgggaagcagcttaataggcatttgactatttatcaggcaattcaaaggcagcttgtgctagatgatgatgaaagatttgctggcagtagtgactatgtatccagtgacggaagcaggttgtggggtgatatttatactataacttatcatagggctgagaaccagacagataggactccccctggaggttcaacctctaatgcttcaaaatcttgcaaatctgggtctgtatcgaattctagttccgaagccaagctgcatcagacatctgtactagatagtatcttgcagggagaattgccctgtgaactggagaaatctaatcctacatacaatatattggcattattgcgggtgcttgagggtttgaaccaacttgcatctcgtttgagggcccaagtggttactgatagctttgctgagggaaaaattttggatttagatgagctaagtgttaccagcggtgctagggttcctacagaggaatttataagcagcaaacttactccaaaattagctaggcaaatacaagatgcccttgccttatgcagtgggagtcttccctcgtggtgttaccagttatctaaagcgtgcccttttttgtttccttttgagacccggcgacagtatttttattcaactgcctttgggttatctcgtgcattgtatcgccttcagcagcagcagggtgctgatggtcatggatcaacaaatgaaagagaggtcagggttgggagattgcagcgtcaaaaggttcgtgtctctcgaaatcgcattttggattctgctgctaaagtgatggagttgtattctagtcaaaaggctgtacttgaagtagaatattttggtgaagttggcaccggtctgggtcccactctggagttctacacacttctcagtcatgacttacaaaaaattatacttgaaatgtggagatcaggttcttcagagaaatatcaaatgaaaattgatggagatgaaaagaaaatgaaacgtagtgaaggctcttttgttggagatggagaacttgttcaagctcctcttgggctgtttcctcgaccttggcctgcaaatgctgatgcatcagagggtacccaattttttaaagtgattgaatatttccgactattaggccgtgtaatggctaaggctcttcaagatggacgcctattggatttaccaatgtcagtggcattttataagcttgttcttggtcaagtaagttatgaaatgttgatgtcttatctgatttgatgtgcatcttaaggttgatttttagtatgtatatatttaacccttgatatattgcaggagcttgatttgcatgacattcttttcattgatgctgagcttgggaaaactttgcaagagttaaatgcccttgtttgccgaaaacattatatacaatctactggtggtagctacaccgatacctttgctaatttgcattttcgtggggccccaatagaagatctctgcttggacttcacacttcctggttatccagagtacatcttgaaacctggagatgaaattgtatgtattcagtctgtttctattacctggtttttgttttggttctgattctgtctgttatgaaaattgctttgaacttactgtcaaacttccaggttgacatcaataatctagaggagtacatatccatggtggttgaggcaactgttaagactggaatcatgcgtcaaatggaagcatttagagcagggttcaatcaggttatatgctgtctcaattaattcatgtaacttttgtctttgactgtgcaccttgtttggtgatgctgtgtaagctcttatctaaaatgtcatgtattttttaactgtgatcagaaagttctgtaatatcattgttgtctgtcttttacttgcacattgtcaattcttatttaaaacatcatgtattttttaattgtgatcagaaagttctgtaatatcattgtctgtcttttacttgcacattgtccattctttttggtgttccttctctcaaacaattttattgaaaagtaaacttgactggggtttaatttgataatattgagcatggattcttcagcttttagattcttaaggggcattgttttttctaataaaaattattacttttggttatatcttgagcagtgaactgcatatatagcctgaatatcggatgtattaattaagaaattacaaaatgtttgtttttgacttttacttatgtttgctaccaaccttgtgtcccccttcccctggcccctgcacatcaagaatggaagatagaaaatacacatttttttttatattgatgtcaaatattcagttatttaatgtcaaaattttacaagtgaaataagctactggctgaggaagagatgggctgggctgggcaatagttggaacttggaaaaactagtttgatgatttgttcatttgcttgagtccaaaaactaaacatttgtcacttgcccacttgttcttttcaattcaggtttttgacatctcatctttacaaattttttctccccaagaactggattacttgctttgtggccggagagaattgtggaaggtattcttttttgtgcaaaagtattactgctgcttacaacaatattttaaatgttaccatgaataatgtagttataaatttatttttctcttttctgcagactgagacactagccgatcatataaaatttgaccatggttatactgccaagagccctgccatagttaatgtatggttcttttccccatagaaggacatttgtgtttttggaaatttaggcttgctatatttgatgctgaacctctatgatgctattttcagttactcggaattatgggagaattcacaccagagcaacagcgtgccttctgtcaatttgttactggtgcacctaggttgcctcctggtggactggcagttctaaatccaaaattaacgattgtgaggaaggtattgaaaaaatatttttgatcacttgcaacctgtgctatttattcatgcggccttcacgcaattttgtacttgaatgttaaagtggctttcctctacttttcctttttacctcttaaaagggggcttacaaaatgcaagtttgtaagtgattacatttacatgtctgggtgcagctttcatcaagtgcagctaatgcttcatctaatgggaacggtccttcagaattagcggatgatgacttgccaagtgtgatgacgtgtgcaaattaccttaagcttcctccttattctaccaaggtagaacactgcaaagcattgttggtaatatgatcatgcatgtcaaagtgtcttttggtgttgaactgttgatatttgatttccattttaaaacaggaaattatgtacaagaagctactctatgcaatcagtgaaggccagggatcctttgatttatcgtgagtttctggaactaaccaacccggccctgtatgttaatatgatgatgaatcagggtttactcttgagacttgattattttttggttatatgtactttcctccctgcttctcaaataatggcctctcccgggtcacacatcaaaggtggtgacatggttcaggtgagtttaccattgttgtgaaacctcactatgattcttgacactactagaccattgttgtgagcttaccaagagcctcttattattttgttcattttcatttgttggtaaactaattaatatcatttctttgattactggcagttgaatcggatcgcctcgttctaaaggtgtaaaggaatttgcggagctcgttttagctgttacaacatgtaaatagaataggaatgttgagtaattccctccccctctaaattttccatcattctgttttcaactcaaattattggcagttagttattatacatgcatggaagatggtaaaaggaatagaaataatatcaaatactatgctttattatttcatgttagatctgttacgagcttttgttgaggtaaaatgtggatatcactctatgctgatgctatttgctatgattgccccaaaatgaggcgctctatagcataaataagtgctgtttgggttgccgattggttagtcgctaatgtacttttgctaaagcatctcttttgttacttctccgttgaaatgcattgaaattcccgcaaccaaggtttgaatgggaattcaaacattccctaaatttcatgtactagctagggctatctaaactgtgatagcgccaattctaatgcactttaaattttccccaagttattagaatattatgttctaatgtgttgaaacggttcaaatagactttttatattataagattaaattactcatttgatttcttgatttatatttttttagttcctataatttatattttaatttgtttttagttcttatagtttgaaagtgattttttagtctttataatttatattttaattatcttttatcacaaaaaatatataaaaataattaattataaattattaattttttttataaattatcttgtgataaattagttataaattatttgttattatttttataattaatcttaattgataatattagttatattttgatggtaaggattaaaaaaaattaaaatataaaatatactgattaaaaatataacttaaatcataaaaattaaaaaaaataaaatataaattataagaattaaaaaaattacatcaattaaaagaaaatggtctagtatgacaataagagaaatgcaaattcctagctatagtacgacacaataaatttttggtagctccaatcagagtgaaggacgagtgccattggatatctattcctccagtcgaggatggcgtgcatgttgatctgaaaaagacgtccccagtctatgacacggctcagggatcaaccaaagcacccattccatgttttggtgtaaatactctatctccacaatcattaattctatgctactttgttgagtacccaactacctgtcgtagtcgtggttgtgaaaaacaactcccatacccataactgtcatactgtgagttgctgcaatgcaatatggatgctcttattgagcaacgaaacaagtggttataggaatatgtcagagtcaaaggataaaataattaaagttcattaataatttttttattagttttataaaataaaaagacttccatttttgacaaatgtcatatatgctgtcaaataagtttggtatataactcttatttaaagtaaattttgttttaaaattttctttaggtgtcattcattgttggactggcggccctgcccgttgtcaaagagcatcgttatcgact

SEQ ID NO: 73 - DNA, 16141 bp, Glycine max
tttttagaaaatattaaataattgataagatatatgataattataataacaaataatttaaaatatcaaatattttatctgtatatcattatataattatatttatgtatcttaactcaaataattagtaaaaataatctttaattaaatattttttataaataggtataaattatgtgataattttataaatatataaaaacataagcatgactgatattattaaattatgaatattatatatatatatatatgcgtgtgtgtgcaaaaaaaaaatcaatttgaattggattagatctattttaaaaattaaatatgatccaatccaataaaaaaattgattttttaaatttttaatctatttggattttgattttttaaagttttattggattagatcgatttatgaacaccgtctaatatactaggttcaaaccttagtgtgattattgcaaaacaaaattatatgagagatttacttggtaagatatatatctttcaattcaactttagtttagattaattcaaatttaacctcacttttagttctctctcttcaatgaaaaagaaactcacttttaattattgatgatctcataaaggtaaaagacttttcaatatggaccaatttatttaaactaaaaaagagttatttaaaaaactaaaatatgtttttaaaaaaaatagtttagacagattcagatttttttgcttgttttattaaaaaaaattaagtcaagctttaataaacaggtcatatgtcatctttgttattaaattaaaatcactttgaaatttgattgatttcattggatgattgactgacttaaaaactttgttattaatttttaaaaatgattttataagacaaaatttaaaatcaaatttttaaagagtaagagtgagaaaaaaatatgaaaaagtatgactcaagctcttgtctgtttttacataaagttttaagagctagattatttttatatacacttttttatgatatattttatctcaagatcttaagcaacaaataataatttcaaggcaaatatatataataggacgcacaaaacaaaaaatagaaatcaacatacaccaaattttagttagtttgtctgaatggaataatattttaaagcttgaatgttggatcgattagtgttatttccaaaagcaaaactatgtccctggtttatgtttgaatattaacttatgtttgtgttttatttccaaaaaaaaaaaagaagtacagtcacaatttatatttgaagttgctaaactatactaataagggaggaaaactaggttatttgaacatgaccggccccttgtcgacaacaactgaaagctcgataaatgatcatcactaaatcactatagtagcccgataacttctaaaaaacatttagaaagtcacctttcagtttttaaatgtgtaaatattaatgattatgatgattttttttttaaaaattctaaacaagtcaagtgcaaagattatttatttcattcaggttaagttaaaatgggatttgtgattgtgatttcctaaagttagtgtgatccgtaatacatgtccagtattccgaaaagtacaaacaattactgatctaataaacaatatccttaaaactttcaagactttatggagacaaatagcaatcaaatgtacatgcaaaaaaaaaaaaaaacagaaatatatccaggatttaagcattttcaataggaagactatgcattgtatttgcacataaaagtaggccgtaacaaaaagtcctatccccgctcctctttccccgatcgataagaatagaacatccaataatccattaagggatttctatcaacgttaattctagctagaaacctctgcatgagaacactatctagtactctactcgtgtctttcattacatgttcaagtgagcatgcaaagtaggtgggggaagtaataaaccagacaatcaccaaccttttccatgagagagacatatatattagcaaagcaaggaaccaaagacttcaaatttgcactctcagtgggaaggtctggtatataggcaactctggggtacattggggcgtaatttgttttaaaaatataactattattgaaaattaaaataaaatgttgtagctatttagagtatatagttaaaggtaaaaatatttagaagaaaaatgacaattattgcttttataataattatagatattgatagtgatatataatagatttatatagtttttattttttatttgtttttgaatattttataaataaaaaattacaagtgtttaaaatatacttctatcaaaaaaatcaaattaaaatgtgtatataaacattacatgattattgtttcaattttttagtattttaagaattattggtttgtgtgttataagtattaattgctactgacttataagaattaagaactaaaattattgaaacaaagctgatttggcagtatttatttaaagcagttatagaaaaattgaagaaataatgtgttgatttatcattggcaatacatttttttaattttttttaattactcaatccaattatctaatccaacggccaattaataccagccttatgtttaattggattatattgtaaattagattaaactaaactcaatccaaccagttacatcttatatttttatctaaaatttgtattataatacattttctattaaatacaatttaataatttaactttattgtgcaagtgcaacgtatattaatacaatgcaggtgtctattgaaacgacgacgttgagggatcgaagtgtacgcgccacattgcgacagtgccaccgaggagcgtagctagttcagttccgtttgatgaacgaaaatgaccaatccaccgagcgaaattgtaattttcaacaataaaaaaggcaaagaaagttacatatgaaagcctgttttgttctgtccctttttattcttccctttctttcttacttacccctttccctggcttagggttttctgcccccctgaatcctcatcgctattcatgattacactccttacaattctcactcagcgactcgttcgaaatacgtgaaatccccttatctccaatttctagggtttcgattcattcaactcaccacaaagattggatccatggtagcgtgattggcgctcggtggcgagcgagttgataattatcgggttgggtggattttgtatggaaactcggagccggaagcgggcggaggcttcctcagctgccccttcatccccttcctctggtcccaccactcgttccagcaagcgtgcacgcctctcttcttcttcctccgcttccgccgccgctgccgccgcatccgtttcttccgtgaacactcgctcccgttcatcccggactaaggaacccttgccccctaagaatcctcctcccatggactctgccaatgaatcctctggctcccgccgcgatcgccgcaacaaagacaactccgacaaggggaaggagaaagagcatgatgttaggattagggacagggatgctgacagagggctggcattgaacatggatggtggcggagacgatgatgacaatgacagcgaaggcggtgtggggattttgcatcaaaacttgacctctgcgagtagtgcacttcaggggcttcttcggaaacttggtgctggtttggatgatctgcttccatcatcggctatgggttctgcgtcttcctctcaccagagtgggaggctgaaaaagatcctcttcggattgcgggcggatggcgaagaagggcggcaggttgaagcattgacacagctctgtgagatgctttcgattgggactgaagagtcacttagtacattctctgttgattcgtttgttcccgtgcttgtggggttgttgaatcacgagagcaaccctgacatcatgcttcttgctgccagagcattgacccatctctgtgatgtgctcccttcatcttgtgctgctgttgtgcattatggtgccgtgtcaatcttttgtgcgaggttgctcaccatagaatacatggacctggctgagcaggttgttccttggttcatgactattgtggaattaatgaaaatggtgctagaaagttataaaataaatatttgtgtttcagtgttgaaccctggtgctgcctaattgtttttaaaactatatatttcgatgtttctgggtcaaattttcagttgtagaagaattatgccttttttttttaatctaagacttagcattttgaaaatgaaattcatatagtttgattactgtatttgatggcatgaacagtcccttcaagctctgaagaagatatctcaggagcatcccactgcctgcctacgagcaggtgctcttatggccgtgctttcctatttggacttcttttcaacaggagttcaggtaaattgtcagtgaagtacctacatttagaggatgattgcatcccactggtccttttggacagtcataaatcatttggccacaggtgccattagtgagcaagtgtatgttgacattattctttgtttcagcgggttgcattgtctactgctgcaaatatgtgcaaaaagcttccttcagatgcagctgattttgtgatggaagctgttcctcttctgacaaaccttcttcagtaccatgattccaaggtaaggtcatgttttgttgcaagtcttgtcacataatggaaactgtatttttccttttgcatccataaacttgccttttaaggaagtttagcttgagaagagggaaattttgatccctatatcccatggtataaaatatttatctatagcttcaccttatgcattttcaatttttgtaggttctggagcacgcctctgtttgtttgactcgaatagctgaagcttttgcgtcatctccagacaaattagatgaattgtgcaaccatggacttgtaacacaagctgcctccctcatttctaacagcagttctgggggtggtcaggcttctctcagcacgccgacatatactgtaagtgcaatttttacttttagttagatgcattttgcctatagtttggtccttgacctgggtatatgcagggtttaatccgacttctttcaacttgtgcgagtggatctcctcttggagctaaaaccttactacttcttggaattagtggtattcttaaagatattctatctggttctggagtttcttctaaggcctctgtttctcctgcattaagtaggccgccagaacaggtatagtataacatcagaacttttcttttggtcattcatgtgtagttttatctcgtaatgttcattaaacagacactgaccttaaatccatcattattctaattcttggtttcaaatatatagatatttgagattgtaaacctcacgaatgagcttctgcctccattgccacatggaacaatttctctccctatcatctccaacatgtttttgaaagggcccattgtaaagaagtctcctgctggtagctctggaaaacaagaagacacaaatggaaatgttcctgagatatcggctcgtgagaaactattaaatgatcagcctgaactacttaagcaatttgcgatggatctccttccagttttaatacaggttgatatttgtgcatcaattgcttaaactttgcttgataaatttgttaaattgaaaaaaatgttctgataaattgctcctttgcttccttatttgtcttctttggttaattgatgatattggcttgctgttgatatagatatatggttctagtgtcaatggtcctgttcggcacaaatgcctttctgtcattggaaaattgatgtatttcagcacagcagagatgatccagtctttgttgagtgtgacaaatatatcaaggtatgttgaaatttaattgagttgatattgcttgataccctcactgattttatgggtttagaaaatttatgcattgttgctttgatcatatagtttcttagctggcgtcttagcatggaaagatccacatgttttgcttcctgccttgaaaattgctgaaattcttatggaaaagcttcctgggacattctccaagatgttcattagagaaggtgttgtgcatgcagtggaccaacttattttaactggaaattcgaccaatatctctacacaggcatcttctgccgagaaggataatgattctatatctggagcatcatctcgctctaggcgttatcggcgacgcagtgggaattccaatcctgatggaaatcctttggacgatttgaaaactccagtttcagtaaatgttggttcacctcctaattctgtggatatgccaacagtaaattccagtattcggttatctgttagtacagctgccaaagcttttaaagataagtattttccttcagatcctggggctgctgaagtgggtattactgatgatcttttgcatctgaaaaatctttgcatgaagttaaatgctggtgctgatgaacaaaggaccaatggaaaggggaaatctaaaacttctggatttggtctggaagagtatttaattgggatcatagctgacatgctaaaggaacttggcaaaggagatggggtatctacttttgaattcattggtagtggtgttgttgcagctctgttgaattatttttcttgtgggtatttctctaaagatcgaccattagaaacccaccttcccaagcttcgccaacaagcacttacaaggtttaagttatttatagctgttgcactaccttctactactgaagatgggactgtggctcctatgactgtcttggtccagaagcttcaaaatgccttgtcctccttggagcgtttccctgttgtgctgagtcattcatctaggtcatctagtgggagtgcacgcctctcctctggactaagtgcattatctcagcccttcaagttgcggctttgtcgagcccagggtgaaaggtcacttagggattattcatccaatgttgtactggttgatccattagcaagtttagcagcaattgaggaatttgtttggcctcgtatccaacgaagtgaattgggtcagaagtccactgtacctgctgggaattctgaatctgggacaactcctacaggagctggtgtatcctctccaactacccatcgccattctactagatccagatcatctgttaatataggtgatacatctagaaaggaaataagtcaagataaaagcacaagctcttccaagggtaagggaaaagctgtattaaagcctgcacaagaggaggcaagaggacctcagaccagaaatgctactcgcagaagagaagctcttgataaagatgctcaaataaagcctgtaaacggtgactctacttctgaggtatactgatggaaaccgagttaggggcagatatgacagttatctgtagaaaataactgctttagaaatcaattctgtataagaaactcaaataactgtcttagaaaacagtactgtattagaaactgcaggatggtagttatgtgtagaaaataactgctggtagttatgtattaggagtatatgtctgttagtatgtggtgtaattgggcagtgtaaagtcatttttaagtttgtggatagagaatactctgtaggagacttctgtctctgggacagctagtgctgttttttgtatatgataggagactttagtctctaggacggcaggtgtattgctgtatttgtatgtgataggagacttttgtctctgggacagcaagtgtattgctgtattgtgtgatttcagtgttctatatattttaggtaaatgctagggctctggttgaggaagtaaaaagagggatgcgtaaaaatgtactcctcctatgatttccaaaaaaaaacttttcttttttaattccttaaccagtgcctggcactggttagcaagaccctatattttattactttatcatttggtgttctatcatatactgtgaaatcctagcgatgactttacaatgcttcaacttttttcttctgttaatttataacttccttctggctatgtatgacctgactatgaatgctctgttttcatgttggcttataaagtgaaatacgaagagaatacttgataatgccaatataagatgtaaagatgcattattacatttttcattgcaagcttgaaaagacatcttacatttctctgtatctgtaactttggacatgctggattttgttgtctgtagatccttaaaatgttacctctgccatttagttttataaatggtttttgattataattatctatttaagatatcatctctaatatgagaaacactgcctaggttttctttggattatgttgaacagttgcttttttgcaccattgatttctttacatacattaaaattaagctgttgtaaggtttccctgcaaaagtgttgatttactaaaaaattgaggcagagctagcactgagaggataacttatctattttgcgttgaagtaacattgctgtaagtaatagtgtatttggatgtaatcagatggatactttgtatatgctgatcctcatccttctttcattaagtgcatgtgtcagaatttttagtatggtaccactcaaaaagtcaaaatcgattcctattttcagtttagcttagtttttaattattttcttataacattaaacttgtctgtcatgaagttgtagtttgtatgactctcattggggaatattttagattatttgtgggcgggttacatattttttccgtttaggtgaagctttcttgttttgttttttgttgcttttgattatggcagtgtttacatgcatgttgtttagctaggttcttgtggttgttaaactggtggaagcatctttgagtataaattttttttttggaaggcgtctttgagtataaatattagtcatttgtttttcctgctatgctttggactaaatcatgaacctaatccaagtatcttgaagtagtcatttgtttttccttttctttttttacccttctagtgacattttccaatgtctacattgtaggatgaagatttggatatatcccctgttgagattgatgaggcattggtgattgaagatgatgatatttctgatgatgaagatgatgaccatgatgatgtatgttatctactgtttcttcttctttggctaggattttcttacttccttggtgatgagtatctcatttaagtaattactgtgtttctgtcttttttttttttttgcttttctgacatcatttccttttttaacatggcttttaaatatgttaaaatctgtgtgcatctttatttttttatttccagtgctggtgtccttcaatcttgtttacaattttttcaaaatgagttgctgctgtctttctatcatttctttgttttctatttttcttttctgggtataatgatgcaatgaagttttggtttatgaccttatgcaaactatccataatccaagtctctgaccaatagctcaatcctggtgttttatttccaaatttttaattttagctaccatcattattgttaaccaagattgaacattataattaaattcagttgtatctattaaaatttttgtgcttgttttgttttttctgatgcacaggtactgagggatgattctcttcctgtttgttcacctgacaaagtacatgatgtgaaattgggcgacatagtggaggagagtaatgttgctcctgcaactagtgatggtggccagactaatgctgcctcaggttctagtagcaaagctggtacagtcaggggatcagactctgctgattttaggagtggctatacctcaagctcaagaggtgcaatgtcatttgctgctgctgctatggctggacttggatctgccaatagcagaggtatcaggggtggaagagatcgactagggcgtccattgtttggtagttctaatgatcctccaaagttgatatttactgctggtgggaagcagcttaataggcatttgactatttatcaggcaattcaaaggcagcttgtgctagatgaagatgatgaggagagatttgctggcagtagtgactatgtatccagtgatggaagcaggttgtggggtgatatttatactataacttatcagagggcagagaaccagacagataggactccccctggaggttcaacctctaatgcttcaaaatctggcaaatctgggtctgtattgaattctagttctgaagacaagctaaatcagacatctgtattagatagtattttgcagggagaattgccctgtgaactggagaaatctaatcctacatacaatatattggcattattgcgggtgcttgagggtttgaaccaacttgcatctcgtttgagggcccaagtggttactgatagctttgcagagggaaaaattttggatttagttgagctaagttttaccagtggtgctagggttcctacagaggaatttataagcagcaaacttactccaaaattagctaggcaaatacaagatgcccttgccttatgtagtgggagtcttccctcatggtgttaccagttatctaaagcgtgcccttttttgtttccttttgagacccggcgacagtatttttattcaactgcctttgggttatctcgtgcattgtatcgccttcagcagcagcagggtgctgatggtcatggatcaacaaatgaaagagaggtcagggttgggagattgcagcgtcaaaaggttcgtgtctctcgaaatcgcattttggattctgctgctaaggtgatggagttgtattctagtcaaaaggctgtacttgaagtagaatattttggtgaagttggcaccggtctgggtcccactctggagttctacacacttctcagtcatgacttacaaaaagttgtacttcaaatgtggagatcaggttcttcagagaaatatcaaatggaaattgatggagatgaaaagaaaatgaaaaatagtgaaggctcttttgttggagatggagaactcgttcaagctcctcttgggctgtttcctcgaccttggcctgcaaatgctgatgcatcagagggtacccaaattttcaaagtgattgaatatttccgattattaggccgtgtaatggctaaagctcttcaagatggacgcttattggatttaccattgtcagtggcattttataagcttgttcttggtcaagtaagttatgaaatgttgatgtcttgtctgatttcatgtgtatcttaaggttgatttttagtctctatatatttagcctttgatatattgcaggagcttgatttgcatgacattcttttcattgatgctgaacttgggaaaactttgcaagagttaaatgcccttgtttgccggaaatgttttatagaatctattggtggtagctacactgatacctttgctaatttgcattttcgtggggccccaatagaagatctctgcttggacttcacacttcctggttatccagagtacatcttgaaacctggagatgaaattgtatgtattcagtctgttttttttacctggtttttgttttggttctgattctgtctgtaataaaaattgctttgaacttactgtcaaactttcaggttgacatcaataatctagaggagtacatatccatggtggttgaggcaacggttaagactggaatcatgcgtcaaatggaagcttttagagcagggtttaatcaggttatatgttgtctcaataaattcatgtaactttgtctttgactgtgcatcttgtttggtgatgctgagtataaaaaatatcatgtattttttaactgattaatggttcattctttttggtattccttttctagtttctctcaaacaattttattgaaaactaaacttgactggggtttaatttgaaaatattgagtatggatttttcagcttttagattcttaaggggcattgttttctactaaaaattgttacttttggttatgtcttgagcagtgaactgtatatatatcctgaatctcggatgtatcaattaagaaattactaaatgtttgtttctgacttttacttatgtttgctaccaaccttgtatcccccttcccctgcagatgaagaatggaagttagaaaatacacattttttttgtattgatgtcaaatattcagttatttaatgtcaaaattttacaagtgaaatgagctactagcctaacttatatggaagagatgggctgggcaatagtttgaacttggaacaactagttggataatttgttcatttgcttgagtccaaaaactaaacatttgtcactttcccacttgttcttgtcaattcaggtttttgacatctcatctttacaaattttttctccccaagaactggattacttgctttgcggccggagagaattgtggaaggtattcttttttatacaaaagtattactgctgcttacaacaatcttttagatgttaccatggataatgtagttataattttttttctcctatctgcagactgagacactagctgatcatataaaatttgaccatggttatactgccaagagccctgccatagttaatgtatgtttttttattcctgtagaaggacaattgtgtttttggaaatttaggcttgttatatttggtgctgaacctgtatgatgctattttcagttactcgaaattatgggagaattcacaccagagcagcagcgtgccttctgtcaatttgttactggtgcacctaggctgcctcctggtggactggcagttctaaatccaaaattaacgattgtgaggaaggtattgaaaaatatttttgatcacttgcaacctgtgttattcattcatgccttcatgcaattttgtacttgatatcttgaatgttaaagttttttggggggcgaggatctatttgaacttcggtagcaagatgtgtctggatttactgcctgacatatgttgctccactattcctttacctcttgaaggggggttttcaaaatgcaatgttagtaagtgattacatttacatgtctgggtgcagctttcgtcaagtgcagctaatgcttcatctaacgggaatgggccttcagaattagcagatgatgacttgccaagtgtgatgacgtgtgcaaattacctgaagcttcctccttattctaccaaggtagaacactgcaaagcattgttggttatatgatcatgcatgtcaaagtgtcttttgatctttgatttccattttaaaacaggaaattatgtacaagaagctactctatgcaatcagtgaaggccagggatcctttgatttatcatgagttctggaactacccaacccggccctgtatgttaatatgatgatgaatcagggtttactcgagacttaattattttttggttgcatgtactttcctccctgcttctcaaaataatggcctctctcgggtcacgcacatcaaaggtggtgacatggttcaggtgagtttaccattgttgtgaaacctcactatgattcttgacattactagaccattgttgtgagcttaccaagagcctcttattattttgttcattttcatttgttggtaaactaaattaatattaattctttgattattggcagttgaatcagatcgcctcgtttttaaaggtgtaaaggaatttgcggagctcgttttagctgttacatgtaaatagaataggaatgttgagtaattccctcccaaatttttcatcattctgttttcaactcaaagtattggcagttagttatcatacctgtatggaagatggtaaaaggaatagaaataatatcgtatactatgctttatgatttcatgttagatctgttacgagcttttgttgaggtaaaatgcgaattattctatgcttgtttgctatgattgtcccaaaatgaggcgttctagcataaataagtactgtttgagttaccgattaattaatttgttggtcgctaatgagtcgaggatgcgttgtatgttttgatctgaaaaagacgtcccaactccccagtctaagacacagaccaggaaccaacctaccacccattctttggtgtaaatggcagtctatctccaaaatcaataattctgctactttgagttgagtacccatagcacttgtgattttgaaaacagtctcatacccatacctcttatttccaaaaggtgtaattattgtgcacacttttttttttcattctgaatgccacaaaaaagtttgatatataaagaaggttttagaaattatataagataaaatgtgttacaatctcattaaatcaattcacatttttgatccaattaatttttcatcctgatttattgttttataatatgtagtttgtgcttcagattatatttttagtatgattttaaattttacaattttgaataaaaatataatatgttaagattatatattgaatcaatatgaccgagtcataataataaaataattatatatcactggaaattaaaaatgctgtacgtataataaatgatctctaaaaagttattgctgtaattctaagaataatgaagttgaagaaatttaatgtttgaattaaaatttgaaaagtatttttatggattctaatgcatgattatgaacttcaatgcatcaaatgaagaagagaagtttccgaataaaagagagaataaaaaaataatagatataaaaagttattaatggtgttttatatatatgggtgttcatatattatctctatacacaattaacattaactcacaaatcattaggactataacagcaggtgaaatgtttgataatttggaggaacttaaagatttaaacttcattatcatatattattatatttcaaaagggaaaaacaacctataacttttttcttattaattatctagttcaaataaaactaacttagttcttattaattatctagttctaatttaccaaaaagaatggaccatttgtttaatttgctaaattcaatatgaacaagtctatttgaaccgtttcagctcactacaacctaacaacaacaacaacaacaacttggaattagttatctttgtgttgcatttaaattgtgttctaattatttcctggattgatacatgtttgatacgtagtagaaaatttaaaattgatagtgtttttatatgatccaaacatattggcacatcgttaaataaaagttaaacttttaagtgattgtagaatttccactttgggttctaaaagtggtaatttatgttaattttaaaacttgctagtgaattaatacttttaaagattaaaataacacaagttgtaaatttgaaggattaaaatggtcattgagtagttgtcggaaaaaatggtcaatgagcttaaatatatcttgacgatggatcaagattgttttgtgctttttatataataaactacactatatatatatatatatatatatatttattaaagagactatgttctatctctttcccattaagaaacaaacaaaacaaagcaccgctacttggtacaaaacacagtattctgtacaaatagtgagtaataagtttggaaaaaagaaggaacaataatcatacatggagtgaaggaacaatgatagaaaggaatatgaaacaattattccaagaaattgacaagttgccggggaacattaaacaattatttggggttaagcattttcgacatcttatctgataaaatatttctattgcatgaacgcgtaagatctccaatacctcacaaaatgaaaatgtacgaatattggacaagtaatcttatcgaaagttatttgtaagtgaaacatcttgaaatcttataccaaacatgaaaattcaattcatcattttcatatgtaaggattcttattgagcaacgtaacaagtacctaaggaaacccaacaaaattaagtggaaattagtggacttctaacaagaaacccaagggtaataatacaaactaccaaaagttattcaatcgtgtgcattgttaactaataatgaggagtgtgaggttagtactttttgtcatatgttagcgagttttaaagagtttataactttttttgttttggtgataaacggaataattaatgaactcttttgaattcaaatgaaccaagaaa

SEQ ID NO: 74 - DNA, 12233 bp, Glycine max
tactatgcgatttagttaatctttgactttcttgtttgatatccaattttaaaagtcagtttacatttcataatgaataaaatcaaaataagatatttaaaaaataaaacatgttactgtattattttaacatatttttaaaataattttaagttaaaaaatgatttaatattttaagaaaacaaaaatactattaaacatgtaaatcaattcacataaaattatttgagtttaattaatattctttaattcgagatttatacatatgaacacatgattaaacatctactatcataaatactatcttaatacccgttatatttgtagaaaattatttacttgtttagatgaacgaaatattttttttttcagagacgaatggaagaatgagttaaaataaacaaattatataatttttataaagaaaaaaatatatttaaaaattaaacatgttactacatcatttctaacaattttttttatatttttatgttaaaaaagatttaatatttcagaaaaaaaacactgaatcatgtaaaaaaattgacatgaaattgtttaagtttattcatcttttttccttttcatcaaaccaaataataagtgagagaaggagtggagagttagcaatttggattatttatattttgttttttaaataaaaaatcatatttaatatttttgtgtctattttaatttatttatctttaatcaaacaatcttcattttcatcatattttttacctattaacttttgttttctcccctttatttctcacaactaaaacaaacaaggagagattaaattaaattgataaataaaagatacagtgttgctgcttttgttgaggttgagagggcaagtatttaatatataaaaaatgggtgatatgaaatgtaataattttcaatgagctgaaaacgacgcggagggagcaagcgagttgtgacttctgactcagtgttttagagtgacgagtggatgtatgtgcaaacaacgtatataaggcgtatttgatatatctctgtctttcttgttccttttttattccctctccctctcaccttagggttttcatgcaacaatttcctcctctctctgtacactatattgggaattttcctttgatttagggttttcgccgattttaatttaatacatttaatctgagatgcaagggattaatccaatcgatcgatctaggataggtgagacaaattgaagggtgattctgggttttgtatggaaactcgtagtcgtaagcgggcggaggcttcctcagctgccccttcatcatcctcgtccaccaccaccaccaccgcctctcgttccgccaagtgctctcgtctttcttcttcttcttcttccatcccaaacacaactactgctaatacacgttctcgttccgccaggaacaacaacaacaactccgtttctcccatggaccccaccaatgaatcctccggttccagacgtgatcgccgcggcaagaatttcgatagggacaattcggacaaagggaaggagaaagaacatgatgttaggattagggatgcggagcgggagcgagccttggcgttgaacttggaggctgaagatgttggggatgacgacgatgataatgatagtgagggcggtgtcggaattctgcaccagaatttgatttctgccagtacctttcgagggcttcttcggaaacttggtgctggtttggatgatttgcttcctgctacggctatgggcggttctgtgccctcttctcaccagactggcggactcaagcagatattgtctggtttgcgtgccgatggggaagaaggtcgtcaggttgaggcattgacgcatctttgtgacatgctctccattggcactgaagattcattaagtacattttcggttgattcatttgttcctgtgctagtgggcttgcttaatcatgagagcaatcccgatgtcatgcttcttgcggccagggcgctaacccatttatgtgatgtgcttccttcatcctgtgctgctgttgtgcattatggtgcagtctctatcttctgtgcgaggctgcttaccatagagtatatggacttggctgagcaggttattttctcactcaatctcttttatgcctttagttattatgtatctggaattctttttagaattttgtcttactttgaattctgatagatgtgattgttgatgtgagcagtctcttcaagcactaaagaagatttctcaggagcacccaactgcctgtcttcgagctggagctctgatggctgttctttcttacttggacttcttctcgacaggagttcaggtaactcatcaatgaaatcctaatatcaaagggtgatgattcattttgcatttgccacccttgattggcaagcctatattgacacaatcatgtttcagcgggtggcattgtctactgctgcaaatatgtgcaagaagcttcctcctgatgcagctgactttgtgatggaagctgttccacttttgacaaacctccttcagtaccacgactccaaggtaaggccaaggccatgtttgcttgtcataaaaatgaaaactgcactttccttgtcattccttccctttaaggaaattttgtttatgtaaatattgattcctacaatgttgtcaattatctatttgagtcttcataatattcaatgttaatttttgtaggtcctggaacatgcctctgtttgtttgacacgaatagctaaagcgtttgcatcatctccagacaaattagatgaattgtgcaatcatggactggtaacacaagctgcctctctcatttctaccagcggttctggaggtgggcaggcttctctcagcaccccaacatatactgtaagtgcaatctttgccactaaatctgatatttttatcctttggtgggttgttcatttgacttcattggtgcttgcagggtttgatccgccttctttccacatgtgcaagtgggtctcctcttggagctaaaacgttgcttctccatggagctagtggcatacttaaagatatactatccggttccggtgtttcttctaacacctctgtttcgcctgcattgagtaggccagcggatcaggtatgatgtgcttttgagttcttttggtctattagatgtagttggtatctctatagttcatttgatagactgtgacattgatctcatcatttaaatctcagaaaacttttcagttctctttttgtgaaagatgagtttatcctaattctcttttctaatatttagatatttgagattgtgaacctggcaaatgaacttctgcctccattgcctcaaggaaccatttctcttcctgtcagctccaacttgtttgtgaaagagtctgttgtgaaaaaatctcctccttctgggaatcccgggatacaagaagacacaaatggaaatgttcatgaaatatcagctcgtgcaaaattattaaatgataagcctgagttacttaagcaatttgggatggatctcctcccagttttaatgcaggttcaatgtttaaatttactcatcgttaaaatgctcaaattgtattttgtgatttgtttataaatttttaattttttaaataaataaccagctctattttttatatccttgacttcttcattccttcactcctgtgacttattaatagttttgtcttacttttgaagtagatatatggtgctagcgtcaatggtccagttcggcacaaatgtctttctgtcattggaaaattgatgtatttcagcacagctgagatgatccagtctttgttgagtgtaacaaatatatcaaggtatttagaacttcaattgggttgctgttgctctatgttctctgtagaaaacttatgcattgtcactttgatgatatagtttcttagctggtgtgttagcatggaaagatccacatgttttggttcctgccttgcaaatttcagaaattcttatggaaaagcttcctggaattttctctaaaatgtttgtcagagaaggtgtggttcatgcagttgaccaacttattttggctggaaatgcaactaatatatctacacaaacatcatctgctgagaaggatactgattctgtatctggaacttcatctcgctctagacgctatcgcctgcgcagtggtaattcaaatcccgatgcgaaccgttcggatgatttgaagagtccagttccagtaaatgttggtttgccaccaagttctgtggaaactccaacaactaattctagtatccgtgcatccattagctcagttgctaatgcttttaaagacaagtactttccttctgatcctgggtctgttgaagtgggtgttagtgatgatcttttgcatctgaaaaatctatgctcgaagttgaacactggtgttgatgaccaaagaagtaaggccaagggaaaagttgaagcttctggatttgatctggatgatgattctactaacacagaagagtatttgattggggtgatatctgacatgctaaaggaacttggcaaaggagatagtgtatctacttttgaatttatcggtagtggtgttgttgaagccttgctaaattatttttcttgtgggtatttctctaaagatcgaatatcagaaaccaatctccccaagcttcgccaacaggcacttacaaggttcaagtcatttgttgctgttgcattacctttgagcattgacaatggggctgttgctcctatgactgtcttggttcagaagcttcaaaatgtgttgtcctccttggagcgtttccctgtaatgctgagtaattcatctcggtcatctagtggaagtggacgtctctcctctgggctaagtgcattatctcagcccataaaattacgtttctgtcgagcccagggtgaaaagtcacttaaggattattcatccagtgtggtactgattgatccgttagcaagtctagcagccatcgaggaatttctatgggctcgtgtccagcgtggtgaatctggtctaaagtctactgtaggcactgaaaattctgaatctggaacaactcctgcaggggctggtgtttcatctccttcctcttatattccctccactgcctttcgttattcaaccggatccagatccagatcatctgttaatataggagatacacctagaaaagaaatatttcaagacaatggcacgagctcatctaagagcaagggtaaagctgtattaaaacctgcgcaggaggaagcacggggaccccaaacaaggaatgcagtgcgcagaagagcagctctagataaagacgctcaaatgaaacctgcaaatggcgactcaacttctgaggtatgttgctaaattttgggaatgagtcataatagttaaataattttaatctaaattggtttataatactgaataatttaatccttgttgtattttgtttatacttatacttattgtccttccctctttttgttagataaaaaaccattggtgtgacttcttcatctaatagttagttgatgatggcttttattttactgctttagattaaaatgatgcttttcagttgatgtgtttcctgtagcatcttaaacttgagtcgtggcttttattgtttaagccgttttttattgtttgacactattttccactgcctttatgggataggatgaagaattggatatatctcctgttgaaattgatgaggctttggtgattgaagatgatgatatttctgatgatgaggatgaagaccgtgaagatgtatgtttcttcttcttcttcttcttcttcttctaagatttcatcttatggttgttattacttttattcacatctcattttgtgatctaaatggtaagatctcacaatctagctgacacattcctttctgaatcacatgtaaaatcttaaatgagtttgttgtgagatttaaagatcactgaactagtgagattgtgcaatccaaaaatctgtctaatttcgagttatgtttgaagtattttcttttgtggtcttctggttgtgttatgtatgtgactaattatgacttgttttggatgctacaagtatgaaatttcaattttaagtttgctataatgttatctacttttttctttcatattttctatgcatacataaacctatataatttgtttgctaggattttatgatctacattttacgattttgcaaccttctttcaaactaggtagaatctcgatcttgacaaaattggttgctaccaggattgaaaactatcatttaggtgcttccgttcttggagttgagttttacctaatagaaatgttattgttgtttccaagaatggatgctaccgttaattgttgtttagattggatactatgatttggtttagctgttttgttctagctattgaattttatcaaatagaaatggtatttattgtttcttatatttttaataatcattaattgttgattccaagattggatgatatcgtttgatttggctgcatccatgctattaattgaatgttatcaaacagaaatgatattatttcactaaccatcatctaatgcatcatcagcttgctttatttatttatttattttatttttgtgcaggtacggagggattattatcttcctgtctacttgcctgacgaagtgcatgatgtgaaattgggtgactcagctgaggagagtactgttgctcctgcaacaagtgatagccagactaatgcagcttcaggttctagcagcaaagcgggtacagccaggggttgtgactctgctgattttaggagtgggtattcatctagctcaaggggtgcaatgtcatttgctgctgctgctatggctggacttggatatgctaatagcagaggtttcaggggtggcagagataggcatgggcgcctgttgtttggtagttctaatgatcctccaaagttgatttttactgctggtgggaagcatcttaataggaatttgactatatatcaggcaattcaaagacagctcatgctagatgaagatgatgatgagagacttgctggcagtgaccgtgtatctagtgatggaagcagcctgtggggtgatatttacaccatcacttatcaaagggcagaaaaccagccagataaggcatccaatggtggatcaagttcaaatacttcaaaatctgccaaatctgggtctgcattaaattccagctcagaagctaaattgcatcagacatctgttctagacagtatattgcagggagacttgccatgtgatctagagaaatctaatcctacctacaatattttggcactcctgcgtgtgctggagggtttgaaccagcttgcgcctcatttgaggacccaaatggtttctgatagcttcgccaagggaaaaatcttggatttagatgagctaggtgttacaactggtgctagggtgcttccagaggaatttgtgagtggtaagcttactccaaaattggctaggcaaatacaagatgcccttgcactatgcagtggtagtcttcccttatggtgttgccagttgactaaagcatgccctttcttgtttccttttgacacccgacgacagtacttttattctaccgcatttgggttatctcgtgcattgtatcgacttcagcagcagcaaggcgctgatggtcatggatcaacaactgagagggaggtgagagttgggagattgcagcgccaaaaggttcgtgtctctcgaaatcgtgtcttggattctgctgcaaaagttatggggatgtattctagccaaaaagctgtacttgaagtagaatattttggtgaagttgggactggcctgggtcccacccttgagttttatacaattctaagtcatgatttgcaacaagttggattgcaaatgtggagatcttattcttcagaaaaacatcaaatggaaattgatagagatgaaaagaaaaagaaaagtgatggctctgggcctaatttggctggagatggagaacttgttgaagctcctctggggttgtttcctcggccttggcctacaaattctgatgcatcagagggtagccggttttcaaaagtcgttgagtatttccggctgctaggtcgtgttatggctaaagctcttcaagacggacgacttttggacctgccattgtcagtggcattttataagcttgttctcggccaagtatgttgtgcaatattgatgttttaaccattttcatttgtattgttaatctgatggtcaatttcttctagtctatgtacctaaccttcactttgtggcaggatcttgatttgcatgacattctgtccattgatgctgagcttgggaagactttgcaagagttcaatgcccttgtttgtcggaaacattatatagaatctattggtggtagctatacagatacaattgttaacttgcattttcatggggtgccaatcgaagatctttgcttagattttacactccctggttatcctgaatacaccttgaagccaggagatgaaattgtatggagttaaactctgagctagtctttagatattggttcttgtgttacagaaatttcctttaacttactctcaaattctcaggttgatatcaacaatttggaggagtatatatccttggtggcagatgcaactgtcaagactggaatcatgcggcaaatagaagcatttagagcagggtttaaccaggttctatgctgttcttaataattagtaatttaactttaaacgtatgcattgttggcgtggagcatgttattattctaaaacaaggtgtttccctctcccctttccattggaaaatagcttttattgacattatcatccttgtctatgcatgctcctatacttaagtcccaccacatccctgagaatttgtttttaactgcacacaatgtagatccatgtagctgacaccacctagtgggataagattattgtagttgtagattggaattagtttacctgatgcatgacattaatttgttaacatgtcattgaaatgcttaagtgacattctgtctcactaaaaattatttggtgttttactgagatcttaaatatcttctgtttatctctaatgcttgaatattccacttgggagcttatatatgctcctgttcttttacttacattggctcccaaccaccaaccatactttccctgcacaaaatggaaattgcaagattcagttattggatgttaaattttttacattctgaaatctgaatatattgtttgtgaaatgggtgggtagttatggttctggtagactctcttgtggatgagaagaggatattgatggggaaattagttacttttggctcatttaatttagttgaaaactaaacatcacttgtatgcttgtgctgtttaatacaggtttttgacatctcgtctttacaaatttttactcctcaagaactagataatttgctttgcggctgcagggagttgtgggaggtatttttgcccaattttattattgcttttaatattagttaaaatattagaacaaggcattgaaattacaagtttttttgttatttatcttactgcagtctgagacacttgctgatcatataaaattcgaccatgggtacaatgcaaagagccctgccattattaatgtatgcttttttcccctaattataaggaatattgtgtatgacggaaaattagagctagttatatatgatgctgttctgttggatgctatttcagttacttgaaattatgggagggttcacaccagagcagcaacgtgccttctgtcaatttgttactggtgcacctaggctgccacctggagggctggcagttctaaatccaaaactaacgattgtgaggaaggtattcagaaatggatttttgataacgtgatattaggtttattcatcttgtactttaataattcttttccatattaatttcatggttatatatgcatgtttattttttgttatttccattatattcatgccttattttgggtcttggtgtagctttcgtcaaccgcagttaatacttcatctaatgggaatggaccttcagaatcagcagatgatgacttgcctagtgtgatgacatgtgctaattacctgaaacttcctccttactctaccaaggtactgtgatatgacatacgagaaatgatttttacgtcacaatgtcttcctacctttacttacaccttgttgggggaaaatgtgtttttctaagtttctattgtttttattctccagaagggaaatggtgcaatgaaaatggtgtccaaataactgttgcatcataaatttattgattatattatctctcatgtccatgtttggttggaattaattctagaaaaaattgcttgtttttataatatctcattttgaaactagacaaaactaaacaattatttctccaaaattcatacgtatgttcattactctgatattgcatcttttggtattaatctatgttcattttttaacaggaaattatgtacaagaagctactctatgcaatcaacgagggccggggatcctttgatttatcatgagtttctgaaactaaccaaccttaccctgcatgttaatagatggttcagggtttatagactttattctcgaggctcagttatttatttattttggttggatctgctttgctcctcgtttctcgcttctcgaataatagtctcattttccgtgctcaatgcaaattgcaaggttgtggaattgttcaggtgagtaacttgttactttttcccccgaactggctgggaggttcttctcatattgttctcttttatttctgacatacttacaagaatttctcccataaattgcagttgaatcgggtagccacattttcgaagtgtaggggactttacggagctcttaatttaattttacctgttagaacttgtaaatagaatagcaatgatgaaattttgattttcttttttctttttaaaaaatttcattattctgtttgtaattccaattattggcaattagcatgtacgaaaaaatggtaaagggaaaataaataatttaaaatattttgctttataatctcgttatattacttagttacttgtcatttggagttttattgtaaaattttgtcgacctcattcgcttatgttaagtgaatgacttcaagcattatattattgattttcctacgtttgcagtttttatttttatgcattaaactaaagtatgttgttagaaacgtgacttagatccgtttgttccaatcttattattttgaataaaaaaatggtctagcgttttaaaaaataagattttgtttattgtttttctaaaagataaatcttacgagtaacattttgaataaaaaataaagttgtgtaatacctttttttcaaaataatgattaaaaaggtggatttatatttatatatttaggttttgtttgaattcaaattgtgtgatgcgtgatatacttggtaaatgattaaaaagtgattgttacgactcaaccagtttaatttatctagctggttttaaaagtagaatgcagatcaaataaaaagttaaaaggctgacttaatttttttattgtaatttagtttggtaattattcttattttaaaaattgaattgagcattacactttcttttatatcaattgaacattatactatgttgtaatgtagttattattttattaagagtttgtaacgtagttattatcagtgtttttataactactttatatgaactaattgatttttttattcatctatgatagtgattgtgatttttatactgtgtgaacttatttcattagttatcaaattaaaataattttaaaatttataaaactttttttaaaaaaaggtaaaaaaaaaaactgttgaattcatcaatcaaatagtaagagattttgttttatgaaattatatatatttttgttagagacaattcttcttaactcagatattatctcttgcattagttctttttaaatgtttaaagatgtatattgatgatttaaatttaagatatttaatagagataaaataatctcatatcaattgattcattcatatgggtaataagaatttgaattagtttgatttaaattttactttacattgacttaaattacacattatttttagggcaaaatgtgtttatccttttaaaaaattgaaattcttttttgaaatgtgtcacctttgaatcttaaattaaatgctaacttgaagatagaat

SEQ ID NO: 75 - DNA, 12516 bp, Glycine max
tatggttattactaaggatttaacacaaatgattacgttattcttattaattaaagttactaccactatttttttggagtgacactaccacataatttgtttattcatgttattatatatttgaggaaaagtcataaataaattatataatgaataaaaataaaataaaatatttaaaaattaaacatgttactacattatctttaacatattttctctatatttttatgttacaaaaaattgtataatatttaagaaaacaaaaacactattaaacacatagatcaattgatttaaaactattaaagtttaagtaatattttcgaattcgaattctatatatgttacggcatgaaatacttgtaggaagaattagatgcttgtggtctctaaaaaaaacttccctccctcaaaattttccctatggaatgtgaatttttttgttgggtgatacaaaaatgattatgttttttctttacctctttatttaataaatagtaaaattttgatgttctttccttttatttatcattttttcctttttattaaaccaaacaataactgagaggaggaatggggaagtagcaatttggattattcttttcttgttttttttttaaaataaaaaacataacataaaataaaaaattaattttgatgcattgttagttgaaagatgattattattatatattaaaagttaaataataataataaataatttatgttaatttttaatctaccaaattattttaatttaaatattattttctgttttactttatttatgttgaatctaccaatatttatttctcccccaccaccccattttttacatcaacatagattaaaacggatagaatttgtagtggaagattaaataaaattgattaataaaatatatgtatgtttctgggggacaagtatttaaatttaaatttgataagatatgggtgatatgaaatgtagtaattttcaatgagccgaaaacgacgcggaggcagcaagcgagttctcacttagagtgttgttgttgtgcaaacaaagttaagttacgtataaaaggggtatttgatatctctgtctttttattctctccctctcgctcctcaccttagggttttcatgcaacaatttcctcctcctcctcctctctctctctctctctacactagattggggattttccttggatttagggtttccgccgattttgattttaatttaatacatttgtctgagatgcaacggattaatccaatcgatcgatcggggataggtgagacaaattgaagggtgagtgtgggttttgtatggaaactcggagtcggaagcgggcggaggcttcctcagctgccccttcatcctcgtccaccaccccttctcgttcagccaagcgctctcgtctttcttcttcttcttcttccatcctacctgttaatacacgttctcgttccgccaggaataacaacaacaacaacaactccggttccatttctttcatggaccccaccaatgaatcctccgggtcccgacgtgatcgccgtggcaagaatttcgatagggaaaattcggacaaagggaaggagaaggaacaggatgttaggattagggatgcggagcgggagcgagagcgagccttggcgttaaacatggagagtgaagatgttggggatgacgatgataatgatagtgacggcggtgtgggaattctgcaccagaatttgacgtctgccagtagtgcccttcaagggcttcttcggaaacttggtgctggtttggatgatttgcttcctgctactgctatgggcggttctgcgtcatctcctcatcagagtggcagactcaagaagattttgtctggcttgcgtgccgatggggaagaaggtcgtcaggttgaggcattgacgcagctttgtgacatgctctccattggcactgaagattccctcagcacattttcggttgactcatttgttcctgtgctagtgggcttgcttaatcacgagagcaatcccgatgtcatgcttcttgcggccagggcgctaacccatttatgtgatgtgcttccttcatcctgtgctgctgttgtgcattatggtgctgtctctatcttctgtgcgaggctgctcaccatagagtatatggacttggctgagcaggttattttctcagtcaatctcttttgtgcctttacttattatgtatctgtgtcttacgatgtatgagcttcctaagtccttaacccttagttgttgaaaatgggcttccgtcttaaacgaggttcttatcatttgacacaccttacggttttctactttgaattctgatagttgtgattgttgatgtgaacagtctcttcaagcactaaagaagatttctcaggagcacccaactgcctgtcttagagctggagctctgatggctgttctttcttacttggacttcttctcaacaggagttcaggtaactaatcaatgaaatcctaacatcaaagggtgacaattcattttgcgtttaccacccttgattagcaagcctatattgacataatcatgtgtttcagcgggtggcattgtctactgctgcaaatatgtgcaagaagcttcctcctgatgcagctgactttgtgatggaagctgttccacttttgacaaacctccttcagtaccacgactccaaggtaaggcatgtttgcttgtcatatttgtcataaaatgaaaactgcactttccttgtcattccttccttttaaggaaattttgtttgtgtaaatattgatccctacaactgatgttgtcaattatctatttgcgttttcataataaaaaacttcgtaccccattgtccagaggctcttcactatgcgaaggtatgggggagggatgttgtacgcagccttacccttgcattttcataatattcaatgttaatttttgtaggtcctggaacatgcctctgtttgtttgacacgaatagctgaagcatttgcatcatctccagacaaattagatgaattgtgcaatcatggactggtaacacaagctgcctctctcatttctaccagcagttctggaggtgggcaggcttctctcagcactccaacatatactgtaagtgcaatctttgccactaaatctgatacttttatcctttggtgggttgttcctttgacttcattggtgcatgcagggtttgatccgccttctttccacatgtgcaagtgggtctcctcttggagctaaaacgttgcttctccttggaactagtggcattcttaaagatatactatccggttccggtgtttcttctaacacctctgtttcgcctgcattgagtaggccagcggatcaggtatgtgtacttttgagttctttatgtctgttatatgtagttggtatctctatagttcatttgatagattgtgacatcgatctcattatttaaatccttgaaaacttttcagttccctttttgtgaaagatgagtttttcctaattctctttcctaatatttagatatttgagattgtgaacctggcaaatgaacttctgcctccattgcctcaaggaaccatttcccttcctgtcagctccaacttgtttgtgaaagggtctgttgtgaaaaaatcctcttctggcaattctgggatacaagaagacacaaatggaaatgttcatgagatattggctcgtgagaaattattaaatgatcagcctgagttacttcagcaatttgggatggatctcctcccagttttaatgcaggttcaatgcttaaatttacttaattgttaaaatgctcaaattatattttgtgatttgtttattaatttttaacttcttaaataaataactggctctattttttatatcctcgacttcttcattccttcactcccgtcacttattactagttttgtcttgcttttgaaacagatatatggtgctagcgtcaatggtccagttcggcacaaatgtctttctgtcattggaaaattgatgtatttcagcacagctgagatgatccagtctttactgagtgtaacaaatatatcaaggtatctagaacttcaattgggttgctgttgctctatgttctctgtagaatacttatgcattgtcactttgatgatatagtttcttagctggtgtgttagcatggaaagatccacatgttttggttcctgccttgcaaatttcggaaattcttatggaaaagcttcctggaaccttctctaagatgtttgtcagagaaggtgtggttcatgcagttgaccaacttattttggctggaaattcaaccaatatatccacacaaacatcatctgctgagaaggataatgattctgtatctggaacttcatctcgctctagacgctatcgcctgcgcagtggtaattcaaatcccgatgcgaacccttcagatgatttaaagagtccagttccagtaaatgttggtttgccaccaagttctgtagaaactccaacaactaattctagtatccgtgcatctgttagctcagttgctagagcttttaaagacaagtactttccttctgatcctgggtctgttgaagtgggtgttagtgatgatcttttgcatctgaaaaatctatgcacgaagttgatcactggtgttgatgaccaaagaagcaaggcaaagggaaaagttaaagcttctggatttggtctggatgataattctagtaacacagaagagtatttgattggggtgatatctgacatgctaaaggaacttggcaaaggagatagtgtatctacttttgaatttatcggtagtggtgttgttgaagccttgctaaattatttttcttgtgggtatttctctaaagatcgaatatcagaaaccaatctccccaagcttcgccaacaggcactttcaaggttcaagtcatttgtagctgttgcactacctttgagcattgacaatggggctgttgctcctatgactgtcttagttcagaagcttcaaaatgcgttggcctccttggagcgtttccctgttatgctgagtaattcatctcggtcatctagtggaagtgcacgtctctcctctgggctaagtgcattatctcagcccataaaattacgtctctgccgagcccagggtgaaaagtcacttagggattattcatccaatgtggtactgattgatccattagcaagtctagcagccatcgaggaatttctatgggctcgtgtccagcgtggtgaatctggtcagaagtctactgtaggcactgaaaattctgaatctggaacaactcctgctggggcaggtgtttcatctccttcctcttatactccctccactgcccatcgtcattctactagaaccagatcatctgttaatataggagatacacctagaaaagaaacatctcaagacaaaggaacgagctcatcaaagagcaagggtaaagctgtattaaaacctgcgcaggaggaagcgcaaggaccccaaacaaggaatacagtgcgcagaagagcagctcttgataaagtcgctcaaatgaaacctgcaaatggcgactcaacttctgaggtatgctgctaaattctgggaacgagtcataataattaaataatattaatctaaattggtttataacattgaataatttaatctttgttggattttgtttatacttatgcttattctccttccctctttttgttagataaaaaaccattggtgagatttcttcatctaatagttagttgatgttggcttttattttactgctttggattaaaatgatgctttcagttgacgtgtctcctgtagcatcttaaacttgagtggtggcttttattatttaagtcatttttattgtttgacattattttcccctgcttttatgggataggatgaagaattggatatatctcctgttgaaattgctgaggctttggtgattgaagatgatgatatttctgatgatgaggatgaagaccatgaagatgtatgtttcttcttctgctaagatttcatcttattgttgtgattacttttattcatatctcattttgtgatctaaattgtaagatctcacaatcttgctgccactttcctttctgaatcacttgtaaaatcttaaatgagttcgttgtgagatttcaagattgctgaactggtgagattgtgtaatcatgtgcagtccaaaaatctgtcaatttcgagttatgtttcaagtattttcttttgtgacttctggttgtgttatgtatgtgactaattatgacttgttttggatgttatggttatgaaatttcaaggctaagtttgctataatgttatctatatttttctttcatattttctatgcatacataaacctatataattttttggtaggattttatgatctacattttacaattttgcatcccccttccaatcttaggtagaatctcaatcttgacaacattggttgttaccaatattgaaaactatcatttaggcgcatccattcttgcaattgagttttaccaaatagaaatgttattgttgtttccaagaatggatactaccattaattgttgtttagattggatattatgatttggtttagctgttctgttctagctattgaattttatcaaatagaaatggtactattgtttcttatatttttaataatcattaattgatgattccaagattggatgctatcatttgattcagttgcatccatgctagtaattgaatttatgatattattccactaaccatcatctaatgcatcatcagcttgttttatttattttattttattttattttatttttgagcaggtgctgagggatgattctcttcctgtctgcttgcctgacaaagtgcatgatgtgaaattgggtgactcagctgaggagagtactgttgctccagcaacaagtgatagccagactaatgcagcctcaggttcaagcagcaaagctggtacagccaggggttctgactccgctgattttaggagtgggttttcatctagctcaaggggtgcaatgtcatttgctgctgctgctatggctggacttggatatgctaatagcagaggtttcaggggcggcagagataggcatgggtgcctgttgtttggtagttctaatgatcctccgaagttgatttttactactggtgggaagcagcttaataggaatctgagtatatatcaggcaattcaaagacagcttgtgctagatgaagatgatgatgagagatttgctggcagtgactatgtatctggtgatggaagcagtctgtggggtgatatttacaccatcacttatcaaagggcagaaaaccagccagataaggcgtctactggaggatcaagttcaaatacttcaaaatctgccaaatctgggtctgccttaaattcaagctcagaagctaaattgcatcagacatctgttctagacagtatattgcagggagaattgccatgtgatctagagaaatctaatcccacctacaatattttggcactcctgcgtgtgctggagggtttcaaccaacttgcgcctcgtttgagggtcctaatggtttctgatagctttgccaagggaaaaatcttggatttagatgagctatgtgttacaactggtgctagggtgcttctagaggaatttgtaagtggtaagcttactccaaaattggctaggcaaatacaagatgcccttgcactatgcagtggtaatcttcccttatggtgttaccagttgactaaagcgtgccctttcttgtttccttttgagacccgacgacagtacttttattctaccgcatttgggttatctcgtgcactgtatcgacttcaacagcagcaaggtgctgatggccatggttcaacaactgagagggaggtgagagttgggagattgcagcgccaaaaggttcgtgtctctcgaaatcgtgtcctggattctgctgcaaaagttatggagatgtattctagccaaaaagctgtacttgaagtagaatattttggtgaagttggcactggtctgggtcccacccttgagttttatacaattctaagtcatgatttgcaaaaagttggactgcaaatgtggagatcttattcttcagacaaacatcaaatggaaatagatggagatgaaaagaaaaagaaaagtgaaggctctgggcctaatttggctggagatggagaacttgttcaagctcctctggggttgtttcctcggccatggcctacaaattctgatgcttcagagagtagccagttttcaaaagtcattgagtatttccggctactaggtcgtgttatggctaaagctcttcaagacggacgactactggacctgccattgtcagtggcattttataagcttgttctctgccaagtatgttgtgcaatattgatgttttaaccattttcattttttattgttaatctgatggtcaatttattctagtcaatgaacctaaccttcactttgtggcaggatcttgatttgcatgacattctgttcattgatgctgagcttgggaagactttacaagagttcaatgcccttgtttgtcggaaacattatatagaatctattggtggtagctatacagatacaattgttaacttgtattttcatggtgcaccaatcgaagatctttgcttagattttactctccctggttatcctgaatacaccttgaagccaggagatgaaattgtatggagttaaaccctgagctagtctatagatcttggttcttctgttatgaaaatttcctttaacttactctcaaattctcaggttgatatcaacaatttggaggagtatatatccttggtgatcgatgcaactgtcaagactggaatcatgcggcaaatagaagcatttagagcagggtttaaccaggttttatgctgttcttaataattagtaatttaactttaaatgtacacattgttggtgtggagcatgttatttttctaaaacaaggtgtttccctctcccctttctagtggaaagtatcttttattgacattatcctccttgtctatatatgctcccatacttatctcccactgcatccctgagaatttgttttttaaccgtgcttaatggtgttgttagatccacgtagctgacatctccttgtgggataagattattgtagttgtagattggaattagtttacctgatgcatgacattaatttgttaacatgccattgaaattcttaagtgacattctgtctcactaaaagttatttggtgttttaccgagatcttaaatatctttcctttatctctcatgcttgaatattccacttgggatcttataaaatatatgatcctgttcttttacttacattggctcccaatcaccaactatactttccctgtacaaaatggaaattgcaagattcagttattggatgttaaactttttacattctgaatatattgtttgtgaaatgggtggggtagttatggctctgctagactctcttgtggaggatgagaagaggatattgatggggaaattagttacttttggctcattttatttagttcaaaactaaacatcacttgtatgcttgtgctgtttaatgcaggtttttgatatctcatctttacaaatttttactcctcaagaactagataatttgctttgcggccgcagggagttgtgggaggtgatttttgcccaattatattattgcttttaatattagttaaaatattagatttagaacaaggcattgaaattaaaagttttttgtttttaatcttactgcaggctgagacacttgctgatcatataaaattcgaccatgggtacaatgcaaagagccctgccattgttaatgtatgtttttttcctcctaattataagtaatattgtgtattatagaaaattagagctagttataatttatgatgcttgtcctgttggatgctattttagttacttgaaattatgggagagttcacaccagagcagcaacgtgccttctgtcaatttgttactggtgcacctaggctgccacctggagggctggcagttctaaatccaaaactaacgattgtgaggaaggtattcagaaatgaatttttgataacgtgatatttaggcttattcatctatattttttttcatattaatttcatggttatatatgcatgtcaatatttgttattaccgttgtattcatgccttattttttggccttggtgcagctttcgtcaactgcagttaataattcatctaatgggaatggaccttcagaatcagcagatgatgacttgcctagtgtgatgacatgtgctaattacctgaaacttcctccttactctaccaaggtactgtgatatggcatatgagaaatgatttttacgtcacaatgtcttccaacccatccttacaccttgtttggggaaaatgtgtttttttctaagtttctattgtttttattttccagaagggaaaatggtgcaatgaaaatggtctccaaataactgtggcatcataaaattcttgattatattatctctcatgtccatgtttggctgggattaattctcgggaaaaaattgcttatttttataataaaagctcattttgaaacttggcaaaactaaggaattatttctcaaaaatacatacgtatgttcattactctgatattgcatcttttggtattaatctatgatgttcaattttcaacaggaaattatgtacaagaagttgctctatgcaatcagtgagggccagggatcctttgatttatcatgagtttctgaaactaaccaaccttaccctgcatgttaatagatggatcagggtttattgactttattctcgagggtcagttgttttttttggttggatgtgctttgctcctcgcttctcgaataatagtgtctcattttccgtgctcaatgcaaattgcaaggttgtggaattattcaggtgagttgaccttttctgccagtaaggttgtattgatgggattaatcatatctttctgctgcagcacgtgaataatttgttacttttttccctcaaactggctgggagcttcttctcatgttgttctcttttatttctgacatacttataaggatttctcccataaattgcagttgaatcgggtcgccacattttcaaagtgtaggggaatttacggagctcttatttgattttacctgttagaacttgtaaatagaatagcaatgatgaaattttgattttcttttttctttttaaaaaagttcattattctgtttgtaattccaattattggcaattagcatgtacgaagaaaaatggtaaagggaaaggaaataatttaaaatattatgctttataatctcattctattacttagtcactagtcatttgttattgtaaaattttgtcaatatcgtcacatggggaaatatcgctaatgttaaagcgaatgacatgaagcattatattattgattttcctacgtttgcagatttatctttatgcattaaactaaagtatgttgttagaaacatgacttagatccgtttgtttcaatcttattttggaggaaaaatgttttaattagttttttaaaatgagatgttaaggccttgtttggggtggtttttagttttgaatttttaaaaataacaattagttttagtttgaaaaaattagtttttaaaatatgattagtttcaaataatttttttattttaaagcgtaatattatactaaaattagtttaaaagtgattttgtgtggtgatgattatagtgcttacgagtttaatttattttttctttaaagataaaatatttttattttttaattttagtaaagttggatttgtatttataaaagatgatcccgtgattataaaaggaaggagggaggaaaaagtgattgggagtttgaattcttccaatgacattcaaaatgtgtaatgtatgatatccttgctaaatgattaaaaagtgattgttaggactagatattttaaattgtgaagctagttttaaaagtagaaagcatatcaaataaaaagtttaaaaagctgtttttttttttttgcaatttagtttgataatttattcttattttgaaaattgaattgaacatatgctttttttaatatcaattcaacattatatatgttgatttttcttttatatataaattactttattttaatctaactcacgactcagttttgacaatgttaatatgtgattctatatgcgttagacatttttagttatggaaaattattagtatataatattgatttcttgtttttaaatataaatattaattattaatttgtcagtgaaaatgatttaaatatataaactctttttttcctccttcttaatcattaatcattaagttaatcttataatttcttaatatttaacattcggtaacatataaactaactgattgtgattggtttgttatattttataaaaagagtttataatgtagttataatcagtgtttt

SEQ ID NO: 76 - DNA, 20852 bp, Zea mays
  misc_feature (1870)..(1969): n is a, c, g, or t
atgagccgaggccaggggtagcggtgtcagcacggacagaggcagagttggctcgaaaagaagactgggtcggccggagcctggccgggtcgtccgttagcgggaccgacgccagagttaatctgccgaggcctcgggctgggctgatgtcttcgggggacagctggtcgaggcctcggggtgaccagctgagccgcctgctcgagccggattcttggagaagaccctggcggcgatggcccgggcgtgatgatgatgtcgtccttcagagtggagatcctcggaccgcgtcgccgtccgaggctaggtcggacctctccgaaggtgtagttgacgccgagggtgctgctgctccctccaaccgtcaagatccgagcctgcaggatcggattatcttgttgtgtgtgttttctgcggccgccgaggcccaaacacaccctcgccgtgttgtaaagctgcgcttcttttcctcttgtttcgagtatctggactttttcgtcggtaacagaattgtctgtgcgagcgagagttgcttttcatggaaggtgatgagtgaggtatccgtatcccggaggcgtaggaatccttcggctcggtcggccttgccgcttacgcgcactcttgcccgtccatagggttctgtcaccgacgcagtcaagaaggcccgaagaatcgcttcagcagaggagctttcgagcgtgaagacttgttcggtccgcggaatcacttatccgaacgtgagttacttatcgcagaaggtgatgagtgaggtatctgtatcccggaggcgtaggagtccctcggctcggtcagccttggctgcttacgtgtactccgtcgttttcgggatccactttcgaagtagtcgaaaaggacgaaagacattctagcggaaaagatcttttttcgaggaaaaatttcgacgcagagggggttccccccttttagcccccgagggagggtcgggctttgccgaggcaaggctgacccttccttgatgactaaactttgcgtgggaatgaggtatgcgaacaaattgaaagcatcttaagggtagaagcgacgtagctgttggatgttccaagcgttgctgtagacctcgccttgactgttggccagcttgtacgttccgagcttcagaactttggcgatgacgaacgtcacttcccagggaggcgtgagcttgtgccgccctcgggcgtcctgtcgcagccgaagcactaggtcgcccacctggaggtctcgggaccggacccctcgggcgtggtagcatcgcagggactgctggtaccgcgccgagtgtagtaaggccatgtcccgagcctcttccagctggtccagcgagtcttctcgactagcttggttgctttggtcggcataggccctcgtcctcgaggaaccgtattctaagtctgtgggcaagatggcctcggccccatagactagaaagaacgacgtgaagcccgtggctcggctcggcgtcgtcctcaggctccagaccaccgaggggagttccttcatccatcgcttgccgaacttgttgaggtcgttgtagatccgaggcttgagtccttgtagaatcatgtcgttggcacgctctacttgcccattcgtcatggggtgagccatggcggcccagtccacccggatgtggtgatcctcgcagaagtctaggaactttctgccgatgaactgggtgccgttgtcggtgatgatggagttcgggaccccaaaacgatggatgatgttggtgaagaacgccacctcctgttcggacctgatgcgtttaggggtcggacctcgatccacttggagaatttgtcgatggcgaccaacaggtgccgtgtagccccgggtgccttctgcaagnnnnnnnnnnnnnnnnnnnnnnnnnnnnnnnnnnnnnnnnnnnnnnnnnnnnnnnnnnnnnnnnnnnnnnnnnnnnnnnnnnnnnnnnnnnnnnnnnnnnaagacaaggagttaaggaacacaactttgttcatggtacaccttgttctggagaaatgcaacaattacctttttattttctgtttacacattaccctgtcttgaatgctacagagtttctactgattagttcagtttatgactatatggtcttacttattctctgatacatttggcaaaggtaaaacttcagggccaacataggccatgctctcccctgatcattttagcaactctgcagaatatctgacagtattttgagctatattgctaatgaaacatgtaaatatgcttttggaaacactgaatttatcttcaaatcacaaccctctttgcctcctaacatcggctgcaagctctgccactggtttttgatagaacatttttctgctttctattgttgtttggatctctagaaataatatcttcacgtttgaaatactatgcatacagataatagacgcatacgtgtaccatctctttgtatttgtatgcatgctcttgatggtggcctaacatatatgctacgtttttttatttagtcattgcaagctcttaaaaaaatatccctggagcatccaactgcgtgcttgcgagctggtgcactaatggcagtcctatcataccttgactttttctccacaggtgttcaggtaatcactctctgcctattatagacttttgcatcacaaaatactttgtttgtttcagctcatttatctcatagcttattcttatgcattacttgtcattatattgtgacagatgaactgtattatttattcttgttatttatttttattactaactgttgtttttgttgatggaatgttttcagagagttgcattatctacagctgctaatatgtgtaggaaacttccttctgatgcatcagattttgtaatggaagcggttccacttcttactaatctactgaactatcatgattcaaaagtacaattgccattccaaatgctgatatcctctatgataccatttatgtttcagatgctgatattccgttttgcttattccaggtactggagcatgcttctgtctgccttacccgtattgcggaatctttttcaccatttccagaaaaattggatgagttgtgcagtcatggattggttgcacaagctgctagcttagtgtctgttagcaactcagcaggacaggcatccttgagtacatcaacatatacagtacgctccattttggctttttgggtacaattatttgttttacgtttgtgaagtttatgccatgtttttatagggtgtgattcgtcttctctcaatatgcgcaagtggatcacctctggcagctaaaacacttctccttcttggaattagtggcatacttaaagatatcctttcaggctctgggttggttgctggcacgactgtgtcccctgctttaacaagaccagctgatcaggtgattttgtcttttcataggcacttcaaggctctttgggtatcatgtgtgcttgatgtctacatttgttgtttatcttaacaagctaaggccccgtttggcactgctccacttcacaaaaacaagcgcaacttcatgaacttcaaaatatagcagcccagctttgaagttgcagagtttttgaagagtttggcttgtagaccagctttagtttcataaaaaaatataattaaaaaaaacttgtttcttcttcctttggccgtggcggccagaggcgcacgtgcgcgacttgggaagacagacacaacgctgcgatggcctggcgtggctctggcggcccagcgcgctgcacgcagcctggcggcacgttgtcggccgatgcggccctgctcgctagcgcaggcggtggcacgcgcgctgccagagtttggttcaggcgtggctctggcagcggcacatggcctggcggtgcggctgccggtcggcacggccctgctcgctggcgtaactgtgtgcggcctgagttcccttgagaacagaacgaaagaaaacatttcgtgagggattgcgtaactgatggcaaaggtgggtaatttcaccccaacttaatgagggagttaaaaatacccattcgtgaagtatacttttggttgtttcatggatttggtgaagttagggtcaacttcaccttttttggtgaagctgggagtgtttggctagagttttataaagctaagctagattttgtgaagtgaagcagtcccaaacattccctaagtgtaaattaatggagctaggcttactctatgcttcagatagtacttcaaccattgattccaatttccaagcctcaggatatcatctctattaaggccccctttggcacggctctggctctagcttcttgcagccccttggaaggagccctgccaaacagccatctaaaacacagctcctggcaaggagccagggccagaaaaatggtttctcccagctccttacaaacttgatacaaattattacaaaactgccactggacctgttttgaccaaaccttttccaaaacggcttcaactggcccaaattataaagccagcacaattaatcccatacacttcccaaccttacaagccccttaatacagcccatctcttccttcattctccatacatatctgaaagtcttccatgttctctctcttctaccacttcgtggcgcagtgaggggggcttacttctaggagcgcctaacatgtgctatataacatctttacgcacaatgacataggaacaagtgtcgtcaaagaaaacaaataatatttgtgtatattaaaacattttttgatgaatttgatgaaatgaaaccaaatcgtcccataacatgtttttctcataatgcattttgttttttaatcgccaccaataatatactttgagcttgtagtcaatgttcgtttatggtatgacattgtttttctttaatgtgagcatactcatactacttcccatgtcgagcatttgtgaacatgatgttatcctatgttctattcatgatagcacaatttatatttgtgatgaattgtcatctatgttaaattttaatgggtactgtaacttgtaaagctactgactttttggtagtaatagattatcaccacacaattccatatgcaaatgatgccattatgtgttttttggtattacacagatgaatgagattgtgaagcttgcagatgagttacttccttctctgcctgttgggaccatttctttaccagtgtattctggtgttcacatgaaaggttgttctgtaaagaaatccacttctagtaagcagggtgaacatggttcaacagcaaatgaactatcaggtcgggagaagttattgcgtgatcagcctgaacttctgcagcaatttggcatggacctgttacctaccatgacacaggtcagtcttgtcttattaatgttctctttgatgttgttaatggtaatgctgatgtggtattacgggacattgttgctatcatgttggtgtgatacttaaggacttcaataccttgaacaggtgtatggctctagtgtaagtggaccaatacggcacaggtgcttatctgtcattgggaaattaatgtactatagctcagctgagatgatccagtctctccttagcacaacaaacatttccaggtgcttaacacaatatatttcatcgagttatctcatgttattagaaactatcttatcacatgaattccaaatatttgtttcaagctattaacttctatatcaaccattgcagttttttggctggcattttagcttggaaagatccacaagtgttgatccctgctcttcagatagcagaagttttaatggaaaagcttccagagatttttttgaagatgtttgtgagggaaggcgttgttcatgctgttgagtcacttatatgcccagaattatctggtcaggtgactcctcatgtggattccattacatcttcacataataggcgcaaccgccgtagaaataatgctgtgaacactggaaataacttgcctgatggaccaaaaggttccaattctatgattgccaattcacccccaagcatggctgaagttccaaataatagtcttcgtgctttagttagtaatcatgcaaagtcatttaaggataaatatttcccttccgagcctggctcaagtgacattgcagttaccgatgaccttcttaaactgagggcactttgtgcaaaactgaatacaacagctgacactatcaaaacaaaagctaaaggaaaatcaaaggtagtgtctgacaatagttttgatgtcttgtgcaatattgaggagcaattggatgatataatagctgaaatgttgtctgagcttagcaagggtgatggtgtttcgacatttgagttcatcggaagtggagttgttacggctttgctaacctatctgtcatgtggaacatttgggagggaaaaggtgtctgaggcaaacataccaaatttgcgtcatcaggcagtcagacgatacaaagcatttatatcttttgcacttccaaatgataaagatgggaataaaactcctatggcattcctagtccataaactgcaaagtgccctatcttcgttggaacgtttcccagttgtgctcagccattctggaagggcatcgactttgggaggatcccgcctgacaacaggtttaggatctctgtcgcagcccatcaaattgcgtctttgtcgagcgcctggtgagaagtcacttaaggatttttcgtccaatgttgttcttattgactcattagctagtctggcagctgttgaagattttctttggcctagagtccagcgcactgaaccagtattgaagcctccaatgtcatctgcaaataattctggatctggagcagcaagctccacagcttgtgcgccttcaattccatcagaaactcaatctgtccgtcgcacatcgttaagatcaaagtcatcagctgccaccagtggtgcaattaagaaggattatcaggagggaagcataaacacctcaaagggaaaaggaaaagctgttcttaaattgagtttggatgaacctaaaggcccacatactaggaatgctgcgcgcagaaaagctacttcagagaaagatgttgaactgaagccatcacatggtcacatcacttcagaggttagatactcgtgcattcaatcttatttgttatttgcataatatatgcgaaatggcctctagcctagtggttaaaggcttccgaatagcacctccaagtctcgggttcgattcccctcaggggcgaattttccggcttcctgtgcgccaccctccggttggaccgctgtagaggggacggttgacgtcagctcgttagtgatggggaggggggggggcagagtttggggattttcttggccgagaccattgttttagtctatcttgatataataccgggatggcggtcattccttccctggctgagttttttttatttgcataatatatcaattgagccctcctaagtgagctccgttgggaagtttagctttaatttctggctctaggacacattgattgcaaatgtttttttaacaatgccttttgtttactcagctgacaaatgttatcatagtaatgatacaacagtaatgcagctgatttattttgccttaagtgtatctagtttgatcagtactttgttttagtatgtaagcaaaggatttcaaagggatgttcttcatagacatgatgtacagattgtataactataaaaggagggggggcagtgctgcaggctccgacatgaggagtctggggaagggataaaccgaggcaacccttctcccgtaaatacggagagacactgctttgaacccacaacctggtgactccgggagacaattcacaccactgacgtacagattgtataactataagtctataatatcataaatgtataacaatgaaaatgcactgaactgtggcatttctgtgtatcatgcatttataatattatatctgagataggatataaaaactgaagcattttttataagagcaacaaagattaaagtagaaatatgcctgtttcactaatattttataatttagtcatattatgtaatgacctgactacgctttcgtaacttagtatactggactatattgtggatactcacaaatatgaaatatcagtgtaatcttttactctaattctctaaataaaagatattgttgtattttgattttaaatatctaagtgaagttttcaggggaaacaactttatgaattattatttggaatagtacgtgcatgttcttttataagtttgatatctgaattttagaaattaaaaagtttgaaagccctgcaacatatatttatattattatacctgcaggatgaagatcttgatgcttctcctgttgagattgatgatgctttaattcttgatgatgatgacgaggatgtcccagatgatgaagatgatgatcatgaggcggtaattattttttaaatcttgcttattactacaaaggtttgtattgaggggacatgatttggaactcagtagattttgttgaaatgatcaggttctccgaggttctcttccttcctgtgttcctgagagagtgcatgatgtgaaattaggagatgctgatgattctagtgttgcctcattggcaaatgataaccaggcacagccctcatctggttctagtacaaaaaatacttctagcaggggattggacactgctgaatttagaagtccagccacatttggttcacgaggtgcaatgtcgtttgctgcagctgcaatggctggattaactccagtaggtggtcgtggaattagaggtagccgagatcggaatggccttccattgggtgctcgtgcaactgagcattacaacaaattgatatttacagctgctgggaagcagctgaacaaacatttgactgtatatcaagctgttcaaagacaagtagttcatgccgaggatgatgaagatcggttcggtggatctgatttacctgatgatggtaaccacttctgggatgatataaggggtgatgtgttcactataacgtatcagaaggctgataacacagcggagaaggggtctgttggaggttcagcttcagtgccaaaatcttccaaatcagattcttgcagaactttgtctgaaaaacagcgtacttctcttcttgatagtattttgcaaggagagcttccctgtgatttagagaaatcaaaccaaacctacaatatcttatcactattacatgtgttggagggtttgaatcagttatcacctcgtctgagactgcagtcagcctgtgatgattttgctgaaggaaaagttgctacattaaatgggctatacgatgttggagctaaggtaccctcaaaggagtttatcaacagtaagatgaccccaaaacttgctcggcaaattcaggatgttcttgcactgtgtagtggcagtttaccatcttggtgttatcagctgacgaaagcttgtccttttctgtttcctttcgaaacacgaaggcaatacttctattccacagcttttgggttgtctcgtgcacttcatcgtcttcagcaacaaccgggcaatgataataacactgcttttgaaagagaagtcaggattggtagattgcaacgccagaaagtccgtgtttctcgtaaccgtatcttggattctgcagctaaagttatggagatgttctctaatcaaaaggctgtcctagaagttgaatactttggtgaagttggaactggtcttggtccaactttggagttttatactctcttaagccgtgagctgcaaagggttgacttaggattgtggagatctcattcttcagataattctgggatgcaaattgatgcgaatactgatgatttaataagaagtaaaaatcatgaatcagaatcacttactgagagcaggaacatagtacaatcacctcttggattatttcctcagccttggccacctactgctgctgcatcagaaggtagcaaattcttcaaagttgtcgagtatttccgcttagttggtcgagtgatggcaaaagcattgcaagatggaaggcttctcgatttgcctttgtcgacagcattttacaaacttttgcttggacaagtaagcatgagggcctccttgagctagttttatcttatgttgtcttctaaaaccttcctcttttcggttggcacttaactttctgtgccttttccttattaatttaccaaatttgctttaataggaacttgatttatatgatatattatcttttgataccgagttcggaaagacattgcaagaactgcaaattctcgttgcacgtaaacaatttttggactcctgctctagtgagagccaaaagatagatctatgtttccgtggtgctcccgttgaagatttatatttggacttcactcttccgggctatcctgaatatgttctcaaggaaggtggagagaatgcagaggtaagttatatgataccttagtttgtttttttcttctagtgttgctgcagatgactcattgttatcctgtcttataggtcaacatttgtaacttagaagagtatatttctttggttgtggatgctactgttaagaccggcataatgcggcaagtagaggcatttaaggcaggattcaatcaggtcttctttcttattttgtgatttgtgggcaatttctattaataattgatcctagaactaactagcacatttatttatttattcagaaaaaaatactcattgtatatttctcacttcaggtgtttgacatatcatcactgcaaatattttctcctcaagaacttgattatctgatttgtggtcgctgtgaactttgggaggtattgcttttgtggtcattcttgatgttgtacttcctctgtcccagaatgataagcatagtttgtataggaaaaagtcaaatttagaattttatttcccagaaattgcttgtattatactagtttatgtggctttgtgtcccgctgccataggtcaatgttagctattgaaagctagttgctctagtctactgcttccctttttttttcgggcggggggggggggggggggggtattctccctcctttgcagttcaccttttttctctcttaatgaaatgatacacaattctcttttgtgttcgagaattctttttacaaactttggccaacaattaatcaaattatatacatgttttggacaaacttgcatcaatagattcatattcagagtgcatttgagatgtgattaattgtttagcaaacataaacatattgtacgagaaattaatggtcaatttttttaatagattatatgagttattgtactcagtctaagtgttatggaccctggtcccgcccatgtaactccttttccaatatatgcaacgtagcccaccctgattggagttaacatggtagcaagcttggtcttttctctccctcccttccctagccgccacctcctggctgccatcactaccgtcgggtcgctattgtcgtctgcgcctccatctcctccctagcgcctttcttgctcatcggccacccatatttattaaggcagtgttaataaccatggggccaccaccttcactttagctttctaggcgcgactggtggccttgttggccctacggttggcgccttgcccaccggtgctttagtcccggtcacctcgattgctgccctagtcgctcccgtcgcccttgcctttgctgtggccatctatggcatgggtgccgccagccagggcccagacctagctgactctggcctagcttatctttcggtcgcgttacttccccctgatgtcgctttcgctcactccaccttggccatagcccccattgctgccaagacggtgtttgctgctgctcgggatcgggaacatgttgctgcccttgcttaggggcacaaacgcaccacgacggatgcactcgctcgatagcagaccaatgctgagggtcacctgctcggctcctcctgcatcgagaccctcccagcgctctagtggtcgcccctttgtcggagtacgaggtcgagatcatcaccaacctctatgccgaggtggcgtgtgtccagaacatttgctctatgattcccgtcatccttgacacaacttcctccaactacgccttctggcgggcgatcttgtcttcactctccatcgctacgccttggactaccacgtcctcaccaacactgtctccctcactaacctatcctggcggcagatggatagtgtggtcctctcgtggatccccaggaccgccatcgttgcgctgcatgacgtggtttgcgagcgtggtggcactatccgtcttggacgtcgtcgagtagttccttggcaatcgtgaggcttgcactctctaccttgatgtcgcctttcagacttttgtctaggggaacctctttgtcactgagtacttttgtcagaggaagggcatgcaagcctccctctatgaccttggggagcccgtctcccatagcatgctcatcctcaacctcctgcatggccttcacctccacacttcgatcacttcctcagttccgttccacaaggtcaaggtcaacaacgacctcatttccgaggagctcaccaaggggctgctaccaccctctacaactccaccactggggggccagcgcatgcaccctcttctactactatcttgggaggatcgtcgttgcgctcgtctgttcatcaaatctcaagcattgcacatcctccccacttgccttggtctgaggggaggggtctagggtggcggtcgacgaaaaggcggtcgtggtggtggccatggggacactccttggccttccatctacaacctgtggactgatcgcatctccatgtggcctggtccttctccgagagtcccttctcagcgtatcactccaccgtagccagctcacttgacattgctcggtctggggtatcaccttggccatcctacgccattagcacctgagtcaccacttctgtcactgccaccccacttcgctttgtcctggaacccgtggccaggtgggtgggatcaacagtctcttgctagctccttcaacacgatgaccttgactcctcccactgtcacctactaggtggctgattcctggtgcctcctatcacaccactttggacgcgagtatgctatattcttatccacctcttcgtctactcctaccattgtgggtaacgagaacattctctcggtcacctctgtcagtgattcggttcttcctaggccctttcaccttcacaatgttcttgttgccccacatatcctttaatattttatccgttcacctattgagcatcggtaattcttgttccatagattttgatccttttggcttgtctgtgaaggatcttgctacctagagtcttcttgcttgttttgatagatctaggcccctgtacacccatgcaagcctgcgtctacctccccacatactggtttcgctacatcatcacattcgtcctcgctacagtcgcctactttgactacttccactatttgtagtacttggcatcgtcgacttgtccatcccaaccttgtagcgtagtccaagctatgtagtactttagtaatttcttgtagtaggggcacccttgagcatctatgccagttgtgtaagttaggtcgtcattttcgacttcctttctctagcttctcacaacatacgctgtgatttgtggacctctccagctctcctgttaccaatgttttgggatataaatattatttggtgattcttgatgattgctctcattgtttgtggatttttccattgagtttaaagtctgacacctttacgactctgctcggttacttcgcttgggtttacacttagtttggttgcactatgaagatcgtccagtgtgacaatggtcgtgagtttgataacttctctcgatcctttacctcacttggagtctaccttcgaatgtcttgcccctacacttcccatcagagtggtaaggctgagtgtatgatttgcaccacgaataatgtaatgtgttccttgatatttcaatcatctgtttccgctcgctagtgggatgggagcctccacactgctacctacctccttaattgtcttcctactacgacaactcttatgtcatgccccccaccccactttgctcgaatggcaaggcttagcgcatgaattaatgtcatgtttttcttgctattttactattttaggcatccgttccttctccttactggtctgagagcctccacaccaccacctacctctttaattgttttcctattacagcgactcgtgcccccacttcccactttgctctttttgtcaacactccaatgaccatcttcgtgttttgggtatgtgtgccaccctaacctttccaccactactctccatcttgttcttcgttctgctcgctgtgtctttctcgggtactcatctgatcacaaagggtactggtgtcttgacctcaccactcatcgccatttgatctctcatcacgtcatattcgttgggatggatgtccccttctcaactaacacctagcccaccaccgcctcccctttcgagttgtattttcttcatgatcctgactccgtggtgccctttgtccaaccactgtttttctagttgctgttttcctctccactgtttcagccggtggcccctgtgtgcccatggtggatcatacacccttgaattcctttcgggttgcaccgttgcccctcgtcgacctgtgtgtcacctcgtcaacccatgttgggtccctaggccccggtggccccacttttgacattgccttcgttgctagggccctctttattgccctcgcctgtgccctcgccttgttgctatgcccaacctgtgcatttctatcagcgacatgcccgagtgggtacaccgcctcgctcttgcgacgagccgacaatgtatcaccccttcatcgtgactctcaccacatccacttgatggcgaattgccaggccactggggtccttagccctgttgattgcctcatcctctccgtgacctcctcattgtcggtttctcatgtgtcgtcttgcgttgattgcaccctttctaatactcattggcgccacgctatgaagaaagagtatctgactatccttgccaatcacacctgggttctggtattctggtgccccatctttcgtgcgacaatgtggtgattgacaagtgggtctggacacataagtggcaggcggctggctcgctgggctactcagtgtcgtgctgttgactacgatgagacgttaattctcgttgtgaagcctgctaccgaccgtgccatcctcactttggccctctcccattttcggccaattcatcacttggatgtcaaaaatgcttttctgcatgggactctcacttagacttgtctactgctgtcagcctactagctgtgttgatcatgcacaccccggtatggtatgcaagctcaacaaagtatgcaaactcaacaagtccctctatggttcgaggcaagccccacacgtttggtacaaccgcttcaccatatatctgctctctttgttttgttgaggccaagttagacacatttctgttcatctatcggtgtggtagtgacactgtatacctactcctatatgttgatgacatcgtgctcactacctcctttctcatgcactagatcaccaccgctcttcagcatgagttcaccatgaaggatttaggcccccttcaccactttatggggattgctgttgagcatcgctttgatggcctcttttttcagcagcgacgatacaccctggacatcctcgagcgtgctggcattctggattgcaagccttgtgtggcgtcagtggacatgtaggccaagctctctggcgtcagtgctccagtcagtggccccatcacctaccatagcctcatcggtgctcttcaccatctcaccttcaccagacctgacatcgtgtatgccatccaacaagtatgtctttatatgcatgatccctgtgacctgtacttgggtgtggtcaagtggatccttattgttgactatggtctcctcctttggcgctccttcatccatgagctaatcatctatactgacgccgatgggccgagtgtcctggacacctgtcggtatacctcggcgaacctcatctcctggtcctccaagcggtagccagtggtctcccgttccagtgctgacgttgagtactggctgttgctaatggggtggctgaggcgagcaagctgcaccaacttctccagtagcttcacaacccactcaccatgagtaccctggtctactacgacaacgtcagcatcgtctacctctctgtcaacccttttcaacaccaccgtattgaccgttttactattggggacgtccgcgtatgtttcaacgagctcgtagtttgatgacaccttcactaagggttttcccttgttcttggagtttcggttgttggggcgggagacagaaccggtcctcaactaccaattgtactcaccactcaccaagattcctaatgcagagtaaccgactaggaggtgcgaaggcctatggcggaaggggcaagccgcggaggccgaccccaacttcggtccttcctaacaatcgcgaaggctacttgactacgcagggaccttggccaaacctcgacgagggacaaacacgttcagcgagggcaggcgggggctaggacgcgtcgaagacccccgaagcaccgaacgaagacccaactgctaccagccgatgttgaccgaggcgagatcactcctctttggtaggccgtcgtgaggcagtttttctctaaggcccccacgcagaggccataagacgaggaatgttggattccgccaagcggcggctcagttgtgggcgtagactcgcctactccacacgtcagcctttgatgtgggtgagaaagatggtgtaatatggaatgtagccaggggacctgtaattaccccgttgcacacctgttgcacggtatatttgtggcatgtagtaggtaaccaagggcattacgatattttaggccttgggcccttggccgccctatagatagccccatcctgtagctggatgggacacacttgacaagacatttgtgctcccagccaattgttttgtcgtgccacctgtaacaccgctctcgagtgcttgggcacactgttctaagtcccaacatcggtccagtctcaacatcttccactactagagtttcatctgcgggggtgggggtaggggtgttagattcttgtgcgttattgtactcaatttaagtgttatgggccttggcccagcccatgtaacccatgcaacacagtttaccctaatttgggttaggtttccaacaattttgtttgacttttccattatcaaaacacacttaggccttgttcgtttacgtcggattgcacccggaaacgttccagctaatcaaagtttatataaattagagaagcaatccggctaggaatcgttccgacccaccaatccgacacaaacgaacaagaccttaatatttcacgatgaatactcaatttaagtgttatgggccttggcccagcccatgtaacccatgcaacacagttcaccctaatttgggttaggtttccaacaattttgtttgacttttccattatcaaaacacacttaataagttaatatttcacgatgaatgtagttgttttggcttattctgaacaatttcacatcatgcagccggaaacactgcctgaacatataaaattcgaccatggttatacctctaagagtcctgcaattgttaatgtaagtttccctgcttctttgtaattcatttgtaggtttcgtaagtttatttggatgtttctaatgttgtgttttgcagtttcttgagatcatggcagaatttactcctgagcagcaacatgctttctgccagtttgtgactggtgctcctcggcttccacctgggggtttggctgctctaaatcctaagttgaccattgttaggaaggtaaattggctatctttgttcttatttgtactttatggttgacatgcctgcccacattgttgaagttttgaattcttcttaaattccagcactcttctgtggcaaataatagttcaaatgcaactggagcgacagagtctgcagatgatgatttgcctagtgtcatgacttgcgccaactatcttaaactaccaccatactccaccaaggtatgcttctttctgctttttggctaactgtggttatatctcctgtattgtcttataaattgaggattcagaaacccagtcaccaaagaattacttcatatagccttatcgtaacaggtaactggacaaattttcaactaaggacgtggaaactaaaatttaatgtgggcagcaccttccagccactcattagttagaattattatttcgttagtttaaatcaaatagcatattccacattgcttgaaccctttatattgacgcatgctggttttttttctggaaggaaatatttacagtgctactcgtgctagtgtgtggcttgttatctgtgtctgaattttgttgaaaacttcttgcaggctatcatgctaaagaaactgctttatgcgatcaacgaaggccaagggtcatttgatctttcgtgaatctcaacactaacataggtattggtccacctagaaatctgcgtcattgttacccagagttagtttctacctcattcatgtatgacataggttaaactcagctctccggagtcccaccgaaggtttggagcccgtacctttgggtgtggatgtctatactctcttttcttggttgtatattcttgcggatctttatagtgaataatagtaataaattgttttgcgcttcttactgtgctaatcatcagtgtcccacccgaagcgtcagccgtcagtcgtacaaattttgctcgatggtttcgctgcccacaaatcggatggatgggggcccatgaacaagggcacgggatttccggggctatctgaaatagtgacgggcatgcaaacacacccaaggtccacggcctgcttttggtcgacacagtgccacgcgaccgtgctggatcttatcactggcctgtcagaggcatctgaggatgtcaagttgtcaaccgaggcgcctatgtgggcacgggactgatcactttcactcgggtcacagcgttcggtcttggcgcttcagccacaaccccaaggatgacgatagctgggcacaaggccacgacagttgcacagatcccctcgtctcgtttgcaggtaccagcgaaattgctaacgtgcgatgcgacccgctgcgaaaactacggatcacgtatcagcggtcgttgtcatatatgatcagtcggccgtgccttggcactgcacaagccaataaaactccgccagaactgaggaaagatggaaccgtccaggagttgctaagccatcgattgcacggatagtatggcaagcggtacatccagtaggtggtttgacctaacattagtgtctgatcccgttagaacatctctaactccgtcttaaattaatgcactatcataaaatataggacttataaaaaacagttccaccagtgccttaatctaaaatttttcatcaaaaaatataggccaaactatgaaatgatctaaatatactacacccccggctagtgtcctatctttatgttgtacattattttcaatattttcttttctaataatgtaatttactttccaaattatatgatttaaggcttaactgttggagtataatttatttttagatccctaaacattttaaacgatgtagtattttaatttttagggcactattttgagccaacttgttggagatgctcttaggttacctacggattccggataaaaaaatcttgaaatttctgccataagattctagaggaatctaacacacaggcacaaaattcaatgaatactagagattatttttatccagaatccagttgatgttggctattattttattcttctattttggatccaaagaaaagaagaagagtaaatccatagaaattcctaactaaaaatgtgatttctaaagatttcattgtaattcttcgaattatcgaacaaatccaatccaacataatacaatttttttgaaattagtaaattaagtaataaagcatagagaaataattaaagaatacaatcgttatccatcttttctttcttttttgcttcatatactaaaaagaattcaaaaaggcaaaattttcgtcatgtcatgaagaattctatctcttgtatacgaataactaggatttaaagaaggaaatgacaaagcatatgtgaataaacgattggtttctatcataaacctgctaaagcctcaaaccactgagtacttagcacgggtgctacaaagagatatgtttttacatatataatcagatactcttgtccaagatcatttgtatttcttttgtttaggctaatttcctaactaaaaaagaaaaataaatatcgtatatatagaatgaaccatatagatgagatttttctatcaagtgagatgtgaaaaaatgttgttggctgtgagctgtaaaaagctaaaaatagtttagtggaagctgctagaatccactaaaatttcttctattatatttttacacggttccatctgaaagttgctaaaaacaagttcatagtgcttccaattttgtaaaccgaggcaatcgtttttttaaaaagctgattcttgaattgagtccttcggtttggcttttggctcttgagaggcaaaagccaaagccaaaagccaaaccaaacataccatttgttattctacacttaaaacaaactaatatataactcgttaatatcagttccaa

SEQ ID NO: 77 - DNA, 14187 bp, Zea mays
tgagaggagttgagtgcaactctcgtccgttacgccacaacgtggagtaggcaagttttgtacttggccgaaccacgggataaccaccgtgtcatctctgtgattgatttcttgtggttattgtgttttgactcctctctagccacttggacatatttgtgctaacacttaacaagtttttgtggcttaagttttgaagttttacaggatcacctattcacccccccctctaggtgctctcagtatttgctgtgatccttgtgtcttgtgtgagttgctaatccctcccttgctctgtgcttctttgtgaacatctttgtaagggcgagagactccaagttgtggagattcctcgcgaacgggatatagaaaagaaaagcaaacaccgtggtattcaagtgggtctttggaccgcttgagaagggttgattgcaaccctcgtccattgggacgccacaacgtggaagtaggcaagtgttgtacttgaccgaaccacgggataaaccactgtgtctacctgtgttgattctcttgtggttattgtgtttcgctaagactcttatctagccacttggcaatactgtgctaacgcttaaccatgtttttgtggcattaagttcaagttttacaggatcacctattcaccccctctaggtgctctcaagagggcgagtggatccgtcatcagtaagacggaatatgcgggaccgggctcaagttggcggctggtgcggacggctccgtttgaggccgaggggcggacgactccatagatgacggcgtgcgggcgcgagaacggatgaaaccgggaggacggtagcgcgcggaccagaagcacatggcacactaggtcaggggtagtctgacgatagggtgggcaaagtgaggcagggtagggcgggggcatggttgtgccgtggtctacattattgacttaatagatagtagagaacaatagcttatttgagattatttttggcaaaagacccactaccccatggttatgtaaatagaaattacaatatatgccatcattctttcctcacttgaaataaacaaacaagggtactgctgtctttatgaataatctacatttgtataatctagactaccaaacaactatatgtagattataatatgtatagattataatctatattatataatttagattataatccagattataaaatctataagatgaaacaaacagacccttagagcatctccagtagttatgtaaacaagtccctaaatatgaatttaacaagttttcgataaaaactattctccaacagttatgtaaatcagttccctaaatgtacaaactccctacaaaacacaatttcatccctacatttaccaaccttgttgggactcactaaatcaacgttggtactaaatccatcatgaaaataatacttttgccactgttttgcgctgtcccactgtcctgttgaccacaaatccatctctaacgcctagatgtcttgtgccgtcactgttagacaacctcttatgcggaggcgtcgttagagcacatcctgtgatgtcttcgcgtcatcgccacgtccgtatggtcttccatcgataacttcgacatcagggaaggttgttgatattgatttctaccgccgactcaattaaaattagaaagcaagctcacttattttttttgttgacgtagacaactttaaaattagcaaccaataaataggaaactgttggatcacatacatttttctacttcttaaagtgttttagcaacttcttaaatctataatttaggatgctaaatttacataagtattgaagatgctcttagtaagctaaaaaacaacaccaaacactagcacaagaaagagaggcagataggcatcgagagtggcaaccgggagatctgatgaaaggccgtccaggcggtccggtccaacagtccgtagatccgcatagtgcagcttgattgatgggatgagagcccatgaagggatggccggcccaggcctggagttgccgaccacgagagatcctgaccagcagttgctgggctgtgtgtgtgtctgcgtctgtcactctcctctctcgcgtcttggtcctcctcctccccttcatcgaacgaatccatccaaggcaaaagggaacgagggaagcaagcaaaaaatccccaattcctcctagatcgatccaccgccgacgggacgaatccaatccaggagctatcggctggaattggattcacgcgcacccgcccgctgccgctggccgccgcctagtctcggccggccggccgaccggccgccctccccgcgcgcgcgccttgccttgtatggaaacacgcagcagcagtcgcaagcgcgcagcggccgccgcctcctcgtccgcctccaagcgcccccgccgcaactcctcttcctcctcctctgcgccgccgcgccagcagccaccgatggaaccctcgccctcctcccgccgccgctcccgcgccgccgccgccgacaagggcaaggaccccgaccccgcctcctccgaccacccttccccacccgcccctgacgatgacgccgacgtcaccttcccccagcccttcacctccgccagcaccgccctccagggcctcctccgcaggctcggcgccggcctcgacgacctcctcccatcctcctcctcagcgccctcctccgccacgtccggtcacctcaagaggatcctcgccggcctgcaggcgcacggcgacgagtcgcgccagctccagtccctcatgcagctctgcgagatgctctccatcggcaccgaggactcgctcgccgccttcccggtcgatgcttttgtcccaatcctcgtcgggatgctcggccgcgaggacgagcctgccaccgctggtgccagccccgacgtcatgctgctcgcggcgcgggcactctccaacctcgttgatgtgctcccctcctcctgctccgcggtcgtgcactacggggccatacagtgcttctgtgctcgactgctcaccatcgagtacatggacctcgctgagcaggtggtgccttccctttgtcttcttcttcctcgttttatcctgtatcatcgctcatcctcactatcatctaaaaatgaaatatgatcagtcatcctctgcatgcatgcccttagccccttaccaaggtgctgctaacacatttactttactcgcctgctcagtctctacaagcccttaagaagatctctctggagcacccaactgcctgtttgcgagctggtgccctaatggctgttctatcgtatctcgacttcttctccactggggttcaggtcgggtcctctgatctccttacaaccgttcttatcttgtgcactgtttgcatctacttacacctcttcccatgggggacgtacttgttgtagagggtagccttgtctaccgctgcaaatatttgcaggaagctgccgtccgatgcttccgagtttgtcatggaagctgtccccttgctcacgaatcttctaaatcaccatgattccaaggtactttgcaagctcagacaaccatacctctggattatgatatattgaggtatatcatgtatttcccaacccttcatctatgtgccttacaggtactagagcatgcttctgtttgtttgacacgcattgctgaagcttttgcctattaccccgacaaacttgatgaactctgcaatcatggattagttgctcaagctgctagcttgatagctgttggcaactcatctggccagacatcactgagcacatccacatatacagtatgggccattttattttgatacccttttattgtttgctgtggcccctctttctcacacttatgctaaaattaggttgcacgcttttcagggcttaatccgtcttctctcaatatgtgcaagtggatccctgctggcagttaaaacactacttcttcttgggatcagcggcactcttaaagatatcctttctggctctgctttgatttctggaacatcagtctcccctgctgtaacaaggcctgcagatcaggtgaatatttctatcactgacttaggacttgactattctgctagtgctggccttttaaaaaaaaatcaatttagccacaatttctctctgtgattggattcaataaaattccgatttatcagtgaaaaattaggctttggcatctcacactttctgaaattacatctaccacacgtatcatgcagacttttagaactctaaaggcgacatcacatgttcataattatatgtaccattgagcaattgtttgggtgatttttttgagcattgaacatagatgctaaaatgtcgggaattgtgctcgtcttcttaaaccatgcaaataatcattcaaaagagcagtgaactagtattttcaaaggcctgcatactttcgttgtgcttttatattgcctgagtaagtcttttgaaatgttttaatgaagcagaaaatgttgatttatggcacacaggggaacaaaagtctcacttgtaatatgatagagcaaaatctcatttggattaagtagctgctgtgattcttgtcgtcttattttcttcctagtgtggtgcaagtaaattgtgcttttggtcaatcgcatttggtatggtacagatcgaagagttttttttccatgctatacaattgagtatgaatatataatgccatctcagcttctgcttgttgctgtcttgcttaattgctaaaatcatttgtggtacatacacacacgagtctggcattttttgagtatgatcgtctgcaacagctgctgtatcttctcacctagctgctgaaacattaattcttgaaacccacactgtttgactcatcagtttcatgcacctgtatgttttttgttgtacaaatgtttttcatatgtttaccccaaatattgcagatgtttgagattgtgagccttgccgatgatttgcttccgcatatccctgcgagaatcattaagttaccaacatattaccatacatataaaggctcttcaacaaagaaatctgcttccatcaaacaagaggggggtggttcaacaggaaatgaaaggtctggccgtgagaggctattgcgtgagcaacctgagcttttacaacagtttggtatggatttgttacccacaatgacacaggttagtgctggaattcttttcctgagtcctgacagccatttcaattgctatttgtgttttgtctttgtgtactttaatagcctgtgtgcttgttcaggtgtatggttctagtgtaaatgcaccaatacgtcacaagtgtttatctatcattggaaaattaatgtactacagctccgccgaaacaatccagtctctccttggcacaacaaacatatccaggttttctctctctctcacctggaacacacaaaagagatgcatgtttcattaatagaaccgaaaaaattctcagttcatttctagagaatgatttcagaacaatggatgttaaaagacaaaaagaaagtctctcaagtctcaatgtacatacttcttttccaatcccttctaagttatttcatttctatctgcagcttccttgcgggcattcttgcatggaaagatcctcaagtgttgattcctgctcttcagatagcagaaataatgatggaaaagcttccagagacattttccaagttatttgtgagggaaggtgtcgttcatgctgtggagtcactcatatgttcagaatcttccaacaaaatgccttctcaggtgccacctcaggataaagataaagattctgccatgccatcacgttctagacgtcaacgccggcgtgcgggtgctgttgcagcagaaaatagttcattggatgaatcaaatagttccaaccttggtgttatgtgctcaacagcaaccgcttcagaagctccaaacaccagccttcgtttcacagttagtgaccatgcaaagtctttcaaagataaatactttccggcggatactgattcaagtgatatcgggtttactgatgaccttcttaaactgagggcactctgtgcaaagttgaatactgtctctgagaacgtcaaaacaaaagcaaaagggaaatcaaaagctataagcactaattttttggacatctcaattgatgttgaagaacaattagacaaaataatatctgaaatgctctctgagcttagcaaagttaatggtgtttccacatttgaattcattagaagtggtgttgtcatagcattgcttgactatttgtcctgtgggacatttgggaaggaaaaggtatctgaaggaaacctatctcagcttcgtcagcaggcccttagacgatacaaaaccttcatatctgttgccctttctattgatcatggacgagatgaaactcccatggcactgttggttcagaaactgcaaagtgcattgtcttcgctggaacgtttccctgttgtgctcagccagtctagtaggattggtattggagggtctcgtctgacttcaggtcttagtgctctggctcaacccttcaagcttcgtctttcccgagctcaaggcgaaaaatcacttcgggattattcatcaaatattgtgcttatcgacccatttgctagtcttgcatctgttgaagaattcctttggcctagagttcaacgcagtgaggttgcatcgaagcctataattccatctggtaataattctgaatctggggttcctggcaccacggctggtgcatcattaacagctgcaatggctcaatctggtcggcgcccaacaacaagatcaaagtcatctgctgcaggtggtcttacatctaagaaggattctcatgatgaaagcactagtactgccaaaggaaaaggaaaagctattgtaaagccaaactcagatgaatcaaaaggacctaatacaaggaatgctgcccaccaaaaatctgcttcagagaaagatttggaaatgaagcaggcacatggccacagtagctctgaggtattttttttgtttacatgcctcattcctggttagtttggcttgcaaagaaaagttactgtttctattcaagttgggtagcagctcttctcaaaagtcgcattgtcagggcctaaggaggcccacggaggggctgcggcagcagcagccatgggccctccaagggggattagataatgatagttagagataagattagaagattagttgagattatttaggagattagttgagattatctaggaaggttatcagttagtttgttgagagtttttaggagagttttaaggagataaaggtctcaagctagacaagggcggccacccggtctatttatgtaatcaatggataagaaataaattaggcaagaattagaagggagaaaccctcctcttgctcggccgtgggcagaggccctcggccgacgttcctgcccgtcgatacccctctctaatccctcaccgatttagcgtccataacacacatccacttctctggtgtcatatttggtgccacctataaagctcatggcttgggcgccaaatgaacatgataattttagccgcggatctagttcttaatttatattaccctcataatatgtaaacatgattttgtgagttcaaaactgtgccaatctaaaaaatattaggataatgatcaagaagtaggctcattttctagttgagagtgtaagcatggtaactgataagtaaatacattctatgttggtatatgtaggatgaagagctcgacacatctcctgttgagatcgatgatgctttgatgattgatgatgatgacatttcagatgatgatgatgatgacgacgatgatcatgaggtaactgtttgaaaattgaatgcccactcttttttttgcttcgttgcaaccatccgtagttgcttaggttcatattcaaggtactaaatagcatgggttcatagcagtttgatgttgcggatgtcaggtgctattacggaccgctaagttccaatagcagtatataataatcaaacataaatttatgtatatatatatcattaatattaatttaatagacgtttaattaattatacttagataagtgatgtctcacatcattattatcaacaaagccttttagccccaagcaagttggggtaggctagagttgaaacccatcggaagccacaaattaaggttgaggcatgtggaaatcgatgtctcactctcacatactttaaattaaataaaggaacatgatattcaacatattacatataagtcatcacacattggactggagtctacaaagaaatatattttgatagccgtaaaatagtcataaaatcatgtttcattgtcatgtcagaagtagtaacctcaatagtttcatgatagttaaaatgggatagggttatttgttgtatatcatacaacactattgtggacactatgaagaagtgcggagcactataacagcctgctacctcaaatagcagccgctaagttccaacctcaaatagtggtagcggtaagagaccgctaccgttttttgcggacgccatagcggttgctactaacgctatttagtaccatgcttatatttatttactttatgacaaaaataaccttttagttggtccaagatgatcatttgtgcccttacttgactaatttaataacctctccaaattcttaggttctccaagaagggtctcttccaatctgttctcaagatggtgtgcatgacgtgaaactgggtgatgccgatgaatctaacattggatcagctacttttagccatgcacagccatcatctggttctggggctagaaacacttctagcaggggaccggattctactgaatttcgaagtatgggcacattcggttcacgaggtgcaatgtcatttgttgctgcgacgatggctggtctggcttctgttggtggtcgcagtgttagaggtgtccgagatcggcgtggtctgtcacttggaggtagcatgaatgatcacaataaacttatattcactgctggtggcaagcagcttaacaaacatttgactgtatatcaagctatccaacgtcaacttatgctcgacgaggatgatgaagaaaggtttaatggatctgatataccaaatgatggaaaccgcttctggggtgatgtgttcacaataacgtaccagaaggctgataaccaagttgagaagggttgccaagggacttccacctcattaaacataaaatcagattcttacaggtccatttctgaagcacaaggggtttctcttcttgatagcatcttacaaggagaacttccttgtgatcttgagaggacaaactcaacgtacaacattttagcattattgcgtatacttgaggggcttaatcagttatcccctcgtttaagagtacagggagcatctgatgattttgctgagggaaaaatcaataccctggatgagttatatagaactggagccaaggtaccttctgaagtgtttgtcaatagcaagttaacaccaaagcttgctcggcaaatgcaggacgttctcgcactatgtagtggcagtttaccttcttggtgttatcaaatgaccaaggcctgcccattcctgtttccttttgagacaaggaggcagtacttctattccacagcctttgggttgtcacgagcattgaatcgactccagcaacagcagagtgataatcacagctctggtggtgaaagagaggtcaggtttggcaggttacaacgccagaaagttcgtgtttcccgtaaccgtattctagattctgctgctaaagttatggagatgttctccagtcagagggctgttcttgaggtggaatactttggcgaagttggaactgggctggggcctactctagagttttatactctcttaagccatgaactacaatgtgctcaactgggattatggagagctacttcttcatatgattcaggattgcacactgatatgaaggatgtgatccgtttagatcctgaagatgggtcgtcaggaaaagaactcaacacagatctaccaggtgatggcatgtatttgatacaagctcctcttggattgttccctcgaccttggccacctaaagttgatacttcagaaggtagcagattcttcaaagttttggagtatttccgcttaataggtcaagtgatcgcaaaagtcctgcaagatggcagacttttagatttgcctttatcaacagcgttttataagcttatacttggacaggtatgtacagagaagctctatttccaagtgctttgctttcattttgttttgctttgttttatgtattaattagttgtttgtattcacttttcacgacttaatgtgttgcaattggccaggaacttgatttgtttgacatagtgtcatttgattctgagtttgggaagacattgcaagaactgcaagttcttgttgaacgaaagcagttccttgaatccacttctggcaagaaccagctacaagttgcagatttgtgtttccatggcgcttctattgaagatttgtgtttagattttactcttccaggttatcctgattatgtgcttaaagagggtgaaggaggcacaattgtaagtgatgaagttccatattagcgtgtatttatcttggtgatttcactttgtatgttttaatctgttagtatcatctgcaggttaatatttataatttagaagagtatattactttggtggtggatgctacagttaagtcagggataaagcgacaggttgaggcatttagatcagggtttaatcaggtacagcctcattggcattgctctaacacaatcttataataattctacttgttctgattttgtgtagttcagtttactctaatagttcttgtttattttaatgtttcgtaggtgtttgacatgtcatccctccacatattttcacctcaagaacttgactatctaatatgtggtcgacaagaaatttgggaggtaatgttctgtcctttttatccaagttaatgtatgtaaaagtgtggcactaaataaaccttggaatctgcagtcggaatccctggtggataacataaaatttgatcatggatatactgctaaaagtcctgcgatcgtgaatgtaagctcattcgtcctcacatgctacatctcttacatacatccagttgtggtttttgagaagtgtggttccttgattcttgctcttgtttgtagctactcgagattttgtcagaattcacccctgagcagcagcatgcgttctgccagtttgtaaccggtgctcctcggcttccacatggtggattggctgcccttagccccaagcttactatagttaggaaggtaccttttcatggtctatctatcgtggcatttgctataatgacatgtgcacacctattctgcttgatgttatttttggggtaactcggtgttttgattattgccagcatccttcaagtgctgtgaatacttcaaattcaactggggcagtagagtccgctgatgatgatttgcctagtgtgatgacgtgcgccaattatctgaagctgcccccctactccacaaaagtacagtgtccttgctgttttatcactaaaaagtcagcttgacattctgatggttcctgctgacgggctgttgctattgtttggacaggaaatcatgcgcaagaagttgctttatgcgatcctggaaggccgaggatcatttgatctttcataagaaatatacaatatccgaactaacatacaggggtcagttttattctggagatttagtttcttggtccatgtataacactgagttgaggttaccagctcactcagcaaacggcttcaagggcgagagccccagtcctcactcggatgcaggtgctgctgtcgatttctcccttcttttacatttgttcagctactgtattctcttcgagggttgcccttgtcacctgcaattatgaatctacagcttttgtcatcgaggaagtttaacagattttggtttctctaccatgatctgtttccattgggcaggctaagctatagtaattgaggatgtgcgccttgagtgaggatgtgcgccaacaagaacccccgtttgtttcagtacatgtaaataaaagggattttttgttccagaattgttatctgtaacaagaacatctacatctgtgatgactgaccattaataaatgtgtcccggtgtaccatttgttttttttctttgagcactggcagtagcaggatacacaaaagggagtgtatgctatatactactagtcgcggatagctcatctggtcatggccacagttttttcttatggagagaataacaaaatttggccctataaacagaaaaaaataaagtgcaagaatcggcagcatgagaattgtttgtacccaagactatctttagtagcttacccatcctacttatatttaactctacaatagtgtagtttatagtgcagaaaagtatataaatagtgttttaagtaaactattaaactctactctacatttaaactctactattaaactctacgaatagtgtaatctataaataatgttttaattaaactatgagtaaactactgactgtctaagtgttattactgaggattcctacaccacgataaaatatacttagtccgttctagcttttatttttatgtccatatttaaatggataacaatgaatctagaatgcatatactaatatcctaaaataaatattattctaaaaaacaaattataatgaataataataactatatatataatcataggtgcaggataatttggttattataattattattatataagataattaatataatactcacaccatcttaaaatataatttattttagatttggagtgtttgaatgtactagaactaatagttagttgactaaaaattgttagtagaattagatagctaacaaataactatctaactattaattaatttatcaaaaatagctaatagctaaactattagctagagtgtttggatgtcttaactaattttagcgactaactattagctctagtgcattcaaacacctctaaatctgttcattgccggctacctttcataaataacttatgaggccaaactaaagagggcagggcaggcgaatcgaaggaaaagtagtcaggagaggcgtttccctcgcaatcgaccatcacagatcaaatcgctgcaactagctagggtttcgtcgcctcatctctcgtcgatccatcgatggcgtccgagggcgaaaacaagaggatgatcacgctcaggagctccgacttagaggagttcgaggtggaggaagcggtggccatggagtcgcagactctccgccacatgatcgaggacgactgcgccgacaacggcatcccgctccccaacgtcaactccaggatcctctctaaggtcatcgagtactgcaacagtcacgtccacgccgccgccaaacccgctgactccgctgcctccgagggcggcgaggacctcaagagctgggacgcgaagttcgtcaaggtggaccaggctacgctcttcgacctcatcctggtcggtaacctcccctccccttgcttcttttgcgattcctgtctatgtataggttagattagatctgctactgtctttctagggttcggattagatcagtatatattgattgattggttgtgcgtcgtggtggaggtccgtaaccaatcaattttttttatctcataagagatgttgtactagcccctgctgctctggaatcaatcaaccacaaaaactgtgatgtggctaggaacactgttgataaatcatgctgttgctattattcgtaacaacaatgcacccgtatcaagctagctacaggcggggatgatatttggtttgcagtgagataatttaactagctagtcagacagaatttggcttgtacttgcgacttttgcacactttggggattgttcgtttgaccgccacgtggattgggtggtattgagtcggtttaaatccatccaaattcattccaatacacttcaatccacatgtaattggacgtgatttgtgttattttctgccattgctggttgacataatggaactgtattttcaggctgccaactatctgaacatcaagggattgctggacctgacctgccagacggttgctgacatgatcaagggcaagactccggaggagatccgcaaga

SEQ ID NO: 78 - protein, 1872 aa, Glycine max
METRSRKRAEASSAAPSSPSSGPTTRSSKRARLSSSSSASAAVNTRSRASNTKEPLPPKNPPPPLPPMDSANESSGSRRDRRNNKENSSDKGKEKEHDVRIRDRDAALNMDGSGGDEDDDNDNDSEGGVGILHQNLTSASSALQGLLRKLGAGLDDLLPSSAMGSASSSHQSGRLKKILFGLRADGEEGRQVEALTQLCEMLSIGTEESLSTFSVDSFVPVLVGLLNHESNPDIMLLAARALTHLCDVLPSSCAAVVHYGAVSIFCARLLTIEYMDLAEQSLQALKKISLEHPTACLRAGALMAVLSYLDFFSTGVQRVALSTAANMCKKLPSDAADFVMEAVPLLTNLLQYHDSKVLEHASVCLTRIAEAFASSPDKLDELCNHGLVTQATSLISNSSSGGGQASLSTPTYTGLIRLLSTCASGSPLGAKTLLLLGISGILKDILSGSGVSSNASVSPALSRPPEQIFEIVNLANELLPPLPHGTISLPIISNMFLKGPIVKKSPSGSSGKQEDTNGNVPEISAREKLLNDQPELLKQFAMDLLPVLIQIYGSSVNGPVRHKCLSVIGKLMYFSTAEMIQSLLSVTNISSFLAGVLAWKDPHVLLPALKIAEILMEKLPGTFSKMFIREGVVHAVDQLILASNSTNISTQASPAEKDNDSISGASSRSRRYRRRSGNSNPDGNPLDDLKTPVSVNVGSPPSSVDMPTLNSSIRLSVSTAAKAFKDKYFPSDPGAAEVGITDDLLHLKNLCMKLNAGDDEQRTNGKGESKTSGFGPEEYLIGIIANMLKELGKGDGVSTFEFIGSGVVAALLNYFSCGYFSKDRPLEAHLPKLRQQALTRFKLFIAVALPSTIEVGTVAPMTVLVQKLQNALSSLERFPVVLSHSSRSSSGSARLSSGLSALSQPFKLRLCRAQGEKSLRDYSSNVVLVDPLASLAAIEEFVWPRIQRSESGQKSTVATGNSESGTTPAGAGVSSPTTRRHSTRSRSSVNIGDTSRKEITQDKSTSSSKGKGKVVLKPAQEEARGPQTRNATRRRAALDKDAQMKPVNADSTSEDEDLDISPVEIDEALVIEDDDISDDEDDDHEDVLRDDSLPVCSPDKVHDVKLGDLAEESNVAPATSDGQANAASGSSSKAGTVRGSDSTDFRSGYNSSSRGAMSFAAAAMAGLGSANSRGIRGGRDRLGRPLFGSSNDPPKLIFTAGGKQLNRHLTIYQAIQRQLVLDDDERFAGSSDYVSSDGSRLWGDIYTITYHRAENQTDRTPPGGSTSNASKSCKSGSVSNSSSEAKLHQTSVLDSILQGELPCELEKSNPTYNILALLRVLEGLNQLASRLRAQVVTDSFAEGKILDLDELSVTSGARVPTEEFISSKLTPKLARQIQDALALCSGSLPSWCYQLSKACPFLFPFETRRQYFYSTAFGLSRALYRLQQQQGADGHGSTNEREVRVGRLQRQKVRVSRNRILDSAAKVMELYSSQKAVLEVEYFGEVGTGLGPTLEFYTLLSHDLQKIILEMWRSGSSEKYQMKIDGDEKKMKRSEGSFVGDGELVQAPLGLFPRPWSANADASEGTQFFKVIEYFRLLGRVMAKALQDGRLLDLPMSVAFYKLVLGQELDLHDILFIDAELGKTLQELNALVCRKHYIQSTGGSYTDTFANLHFRGAPIEDLCLDFTLPGYPEYILKPGDEIVDINNLEEYISMVVEATVKTGIMRQMEAFRAGFNQVFDISSLQIFSPQELDYLLCGRRELWKTETLADHIKFDHGYTAKSPAIVNLLGIMGEFTPEQQRAFCQFVTGAPRLPPGGLAVLNPKLTIVRKLSSSAANASSNGNGPSELADDDLPSVMTCANYLKLPPYSTKEIMYKKLLYAISEGQGSFDLS

SEQ ID NO: 79 - protein, 1877 aa, Glycine max
METRSRKRAEASSAAPSSPSSGPTTRSSKRARLSSSSSASAAAAAASVSSVNTRSRSSRTKEPLPPKNPPPMDSANESSGSRRDRRNKDNSDKGKEKEHDVRIRDRDADRGLALNMDGGGDDDDNDSEGGVGILHQNLTSASSALQGLLRKLGAGLDDLLPSSAMGSASSSHQSGRLKKILFGLRADGEEGRQVEALTQLCEMLSIGTEESLSTFSVDSFVPVLVGLLNHESNPDIMLLAARALTHLCDVLPSSCAAVVHYGAVSIFCARLLTIEYMDLAEQSLQALKKISQEHPTACLRAGALMAVLSYLDFFSTGVQRVALSTAANMCKKLPSDAADFVMEAVPLLTNLLQYHDSKVLEHASVCLTRIAEAFASSPDKLDELCNHGLVTQAASLISNSSSGGGQASLSTPTYTGLIRLLSTCASGSPLGAKTLLLLGISGILKDILSGSGVSSKASVSPALSRPPEQIFEIVNLTNELLPPLPHGTISLPIISNMFLKGPIVKKSPAGSSGKQEDTNGNVPEISAREKLLNDQPELLKQFAMDLLPVLIQIYGSSVNGPVRHKCLSVIGKLMYFSTAEMIQSLLSVTNISSFLAGVLAWKDPHVLLPALKIAEILMEKLPGTFSKMFIREGVVHAVDQLILTGNSTNISTQASSAEKDNDSISGASSRSRRYRRRSGNSNPDGNPLDDLKTPVSVNVGSPPNSVDMPTVNSSIRLSVSTAAKAFKDKYFPSDPGAAEVGITDDLLHLKNLCMKLNAGADEQRTNGKGKSKTSGFGLEEYLIGIIADMLKELGKGDGVSTFEFIGSGVVAALLNYFSCGYFSKDRPLETHLPKLRQQALTRFKLFIAVALPSTTEDGTVAPMTVLVQKLQNALSSLERFPVVLSHSSRSSSGSARLSSGLSALSQPFKLRLCRAQGERSLRDYSSNVVLVDPLASLAAIEEFVWPRIQRSELGQKSTVPAGNSESGTTPTGAGVSSPTTHRHSTRSRSSVNIGDTSRKEISQDKSTSSSKGKGKAVLKPAQEEARGPQTRNATRRREALDKDAQIKPVNGDSTSEDEDLDISPVEIDEALVIEDDDISDDEDDDHDDVLRDDSLPVCSPDKVHDVKLGDIVEESNVAPATSDGGQTNAASGSSSKAGTVRGSDSADFRSGYTSSSRGAMSFAAAAMAGLGSANSRGIRGGRDRLGRPLFGSSNDPPKLIFTAGGKQLNRHLTIYQAIQRQLVLDEDDEERFAGSSDYVSSDGSRLWGDIYTITYQRAENQTDRTPPGGSTSNASKSGKSGSVLNSSSEDKLNQTSVLDSILQGELPCELEKSNPTYNILALLRVLEGLNQLASRLRAQVVTDSFAEGKILDLVELSFTSGARVPTEEFISSKLTPKLARQIQDALALCSGSLPSWCYQLSKACPFLFPFETRRQYFYSTAFGLSRALYRLQQQQGADGHGSTNEREVRVGRLQRQKVRVSRNRILDSAAKVMELYSSQKAVLEVEYFGEVGTGLGPTLEFYTLLSHDLQKVVLQMWRSGSSEKYQMEIDGDEKKMKNSEGSFVGDGELVQAPLGLFPRPWPANADASEGTQIFKVIEYFRLLGRVMAKALQDGRLLDLPLSVAFYKLVLGQELDLHDILFIDAELGKTLQELNALVCRKCFIESIGGSYTDTFANLHFRGAPIEDLCLDFTLPGYPEYILKPGDEIVDINNLEEYISMVVEATVKTGIMRQMEAFRAGFNQVFDISSLQIFSPQELDYLLCGRRELWKTETLADHIKFDHGYTAKSPAIVNLLEIMGEFTPEQQRAFCQFVTGAPRLPPGGLAVLNPKLTIVRKLSSSAANASSNGNGPSELADDDLPSVMTCANYLKLPPYSTKEIMYKKLLYAISEGQGSFDLS

SEQ ID NO: 80 - protein, 1895 aa, Glycine max
METRSRKRAEASSAAPSSSSSTTTTTASRSAKCSRLSSSSSSIPNTTTANTRSRSARNNNNNSVSPMDPTNESSGSRRDRRGKNFDRDNSDKGKEKEHDVRIRDAERERALALNLEAEDVGDDDDDNDSEGGVGILHQNLISASTFRGLLRKLGAGLDDLLPATAMGGSVPSSHQTGGLKQILSGLRADGEEGRQVEALTHLCDMLSIGTEDSLSTFSVDSFVPVLVGLLNHESNPDVMLLAARALTHLCDVLPSSCAAVVHYGAVSIFCARLLTIEYMDLAEQSLQALKKISQEHPTACLRAGALMAVLSYLDFFSTGVQRVALSTAANMCKKLPPDAADFVMEAVPLLTNLLQYHDSKVLEHASVCLTRIAKAFASSPDKLDELCNHGLVTQAASLISTSGSGGGQASLSTPTYTGLIRLLSTCASGSPLGAKTLLLHGASGILKDILSGSGVSSNTSVSPALSRPADQIFEIVNLANELLPPLPQGTISLPVSSNLFVKESVVKKSPPSGNPGIQEDTNGNVHEISARAKLLNDKPELLKQFGMDLLPVLMQIYGASVNGPVRHKCLSVIGKLMYFSTAEMIQSLLSVTNISSFLAGVLAWKDPHVLVPALQISEILMEKLPGIFSKMFVREGVVHAVDQLILAGNATNISTQTSSAEKDTDSVSGTSSRSRRYRLRSGNSNPDANRSDDLKSPVPVNVGLPPSSVETPTTNSSIRASISSVANAFKDKYFPSDPGSVEVGVSDDLLHLKNLCSKLNTGVDDQRSKAKGKVEASGFDLDDDSTNTEEYLIGVISDMLKELGKGDSVSTFEFIGSGVVEALLNYFSCGYFSKDRISETNLPKLRQQALTRFKSFVAVALPLSIDNGAVAPMTVLVQKLQNVLSSLERFPVMLSNSSRSSSGSGRLSSGLSALSQPIKLRFCRAQGEKSLKDYSSSVVLIDPLASLAAIEEFLWARVQRGESGLKSTVGTENSESGTTPAGAGVSSPSSYIPSTAFRYSTGSRSRSSVNIGDTPRKEIFQDNGTSSSKSKGKAVLKPAQEEARGPQTRNAVRRRAALDKDAQMKPANGDSTSEDEELDISPVEIDEALVIEDDDISDDEDEDREDVRRDYYLPVYLPDEVHDVKLGDSAEESTVAPATSDSQTNAASGSSSKAGTARGCDSADFRSGYSSSSRGAMSFAAAAMAGLGYANSRGFRGGRDRHGRLLFGSSNDPPKLIFTAGGKHLNRNLTIYQAIQRQLMLDEDDDERLAGSDRVSSDGSSLWGDIYTITYQRAENQPDKASNGGSSSNTSKSAKSGSALNSSSEAKLHQTSVLDSILQGDLPCDLEKSNPTYNILALLRVLEGLNQLAPHLRTQMVSDSFAKGKILDLDELGVTTGARVLPEEFVSGKLTPKLARQIQDALALCSGSLPLWCCQLTKACPFLFPFDTRRQYFYSTAFGLSRALYRLQQQQGADGHGSTTEREVRVGRLQRQKVRVSRNRVLDSAAKVMGMYSSQKAVLEVEYFGEVGTGLGPTLEFYTILSHDLQQVGLQMWRSYSSEKHQMEIDRDEKKKKSDGSGPNLAGDGELVEAPLGLFPRPWPTNSDASEGSRFSKVVEYFRLLGRVMAKALQDGRLLDLPLSVAFYKLVLGQDLDLHDILSIDAELGKTLQEFNALVCRKHYIESIGGSYTDTIVNLHFHGVPIEDLCLDFTLPGYPEYTLKPGDEIVDINNLEEYISLVADATVKTGIMRQIEAFRAGFNQVFDISSLQIFTPQELDNLLCGCRELWESETLADHIKFDHGYNAKSPAIINLLEIMGGFTPEQQRAFCQFVTGAPRLPPGGLAVLNPKLTIVRKLSSTAVNTSSNGNGPSESADDDLPSVMTCANYLKLPPYSTKEIMYKKLLYAINEGRGSFDLS

SEQ ID NO: 81 - protein, 1891 aa, Glycine max
METRSRKRAEASSAAPSSSSTTPSRSAKRSRLSSSSSSILPVNTRSRSARNNNNNNNSGSISFMDPTNESSGSRRDRRGKNFDRENSDKGKEKEQDVRIRDAERERERALALNMESEDVGDDDDNDSDGGVGILHQNLTSASSALQGLLRKLGAGLDDLLPATAMGGSASSPHQSGRLKKILSGLRADGEEGRQVEALTQLCDMLSIGTEDSLSTFSVDSFVPVLVGLLNHESNPDVMLLAARALTHLCDVLPSSCAAVVHYGAVSIFCARLLTIEYMDLAEQSLQALKKISQEHPTACLRAGALMAVLSYLDFFSTGVQRVALSTAANMCKKLPPDAADFVMEAVPLLTNLLQYHDSKVLEHASVCLTRIAEAFASSPDKLDELCNHGLVTQAASLISTSSSGGGQASLSTPTYTGLIRLLSTCASGSPLGAKTLLLLGTSGILKDILSGSGVSSNTSVSPALSRPADQIFEIVNLANELLPPLPQGTISLPVSSNLFVKGSVVKKSSSGNSGIQEDTNGNVHEILAREKLLNDQPELLQQFGMDLLPVLMQIYGASVNGPVRHKCLSVIGKLMYFSTAEMIQSLLSVTNISSFLAGVLAWKDPHVLVPALQISEILMEKLPGTFSKMFVREGVVHAVDQLILAGNSTNISTQTSSAEKDNDSVSGTSSRSRRYRLRSGNSNPDANPSDDLKSPVPVNVGLPPSSVETPTTNSSIRASVSSVARAFKDKYFPSDPGSVEVGVSDDLLHLKNLCTKLITGVDDQRSKAKGKVKASGFGLDDNSSNTEEYLIGVISDMLKELGKGDSVSTFEFIGSGVVEALLNYFSCGYFSKDRISETNLPKLRQQALSRFKSFVAVALPLSIDNGAVAPMTVLVQKLQNALASLERFPVMLSNSSRSSSGSARLSSGLSALSQPIKLRLCRAQGEKSLRDYSSNVVLIDPLASLAAIEEFLWARVQRGESGQKSTVGTENSESGTTPAGAGVSSPSSYTPSTAHRHSTRTRSSVNIGDTPRKETSQDKGTSSSKSKGKAVLKPAQEEAQGPQTRNTVRRRAALDKVAQMKPANGDSTSEDEELDISPVEIAEALVIEDDDISDDEDEDHEDVLRDDSLPVCLPDKVHDVKLGDSAEESTVAPATSDSQTNAASGSSSKAGTARGSDSADFRSGFSSSSRGAMSFAAAAMAGLGYANSRGFRGGRDRHGCLLFGSSNDPPKLIFTTGGKQLNRNLSIYQAIQRQLVLDEDDDERFAGSDYVSGDGSSLWGDIYTITYQRAENQPDKASTGGSSSNTSKSAKSGSALNSSSEAKLHQTSVLDSILQGELPCDLEKSNPTYNILALLRVLEGFNQLAPRLRVLMVSDSFAKGKILDLDELCVTTGARVLLEEFVSGKLTPKLARQIQDALALCSGNLPLWCYQLTKACPFLFPFETRRQYFYSTAFGLSRALYRLQQQQGADGHGSTTEREVRVGRLQRQKVRVSRNRVLDSAAKVMEMYSSQKAVLEVEYFGEVGTGLGPTLEFYTILSHDLQKVGLQMWRSYSSDKHQMEIDGDEKKKKSEGSGPNLAGDGELVQAPLGLFPRPWPTNSDASESSQFSKVIEYFRLLGRVMAKALQDGRLLDLPLSVAFYKLVLCQDLDLHDILFIDAELGKTLQEFNALVCRKHYIESIGGSYTDTIVNLYFHGAPIEDLCLDFTLPGYPEYTLKPGDEIVDINNLEEYISLVIDATVKTGIMRQIEAFRAGFNQVFDISSLQIFTPQELDNLLCGRRELWEAETLADHIKFDHGYNAKSPAIVNLLEIMGEFTPEQQRAFCQFVTGAPRLPPGGLAVLNPKLTIVRKLSSTAVNNSSNGNGPSESADDDLPSVMTCANYLKLPPYSTKEIMYKKLLYAISEGQGSFDLS

SEQ ID NO: 82 - protein, 1840 aa, Zea mays
METRSRKRAEASSSSATSSSRSSKRSRHNPNPNPPAGPSPAPKLVPLPPRTRRSTAVNPLPPMDSSGDNNSNPVPPPRRRGRPSNTDKGKEQQQPEPSHSSRVREAERLLGLGFEGIDDDEDSGFGAGAIPHSLTSASTALQGLLRKLGAGLDDILPSSALSAAAAAASSSSASGQLSGRLKNILAGLRADGEDGRQVEALTQLCEMLSIGTEESLGAFSVDSFVPVLVGLLNHESNPDIMLLAARALTHLCDVLPSSCSAVVHYGAVPCFCARLLTIEYMDLAEQRVALSTAANMCRKLPSDASDFVMEAVPLLTNLLNYHDSKVLEHASVCLTRIAESFSPFPEKLDELCSHGLVAQAASLVSVSNSAGQASLSTSTYTGVIRLLSICASGSPLAAKTLLLLGISGILKDILSGSGLVAGTTVSPALTRPADQMNEIVKLADELLPSLPVGTISLPVYSGVHMKGCSVKKSTSSKQGEHGSTANELSGREKLLRDQPELLQQFGMDLLPTMTQVYGSSVSGPIRHRCLSVIGKLMYYSSAEMIQSLLSTTNISSFLAGILAWKDPQVLIPALQIAEVLMEKLPEIFLKMFVREGVVHAVESLICPELSGQVTPHVDSITSSHNRRNRRRNNAVNTGNNLPDGPKGSNSMIANSPPSMAEVPNNSLRALVSNHAKSFKDKYFPSEPGSSDIAVTDDLLKLRALCAKLNTTADTIKTKAKGKSKVVSDNSFDVLCNIEEQLDDIIAEMLSELSKGDGVSTFEFIGSGVVTALLTYLSCGTFGREKVSEANIPNLRHQAVRRYKTFISFALPNDKDGNKTPMAFLVHKLQSALSSLERFPVVLSHSGRASTLGGSRLTTGLGSLSQPIKLRLCRAPGEKSLKDFSSNVVLIDSLASLAAVEDFLWPRVQRTEPVLKPPMSSANNSGSGAASSTACAPSIPSETQSVRRTSLRSKSSAATSGAIKKDYQEGSINTSKGKGKAVLKLSLDEPKGPHTRNAARRKATSEKDVELKPSHGHITSEDEDLDASPVEIDDALILDDDDEDVPDDEDDDHEAVLRGSLPSCVPERVHDVKLGDADDSSVASLANDNQAQPSSGSSTKNTSSRGLDTAEFRSPATFGSRGAMSFAAAAMAGLTPVGGRGIRGSRDRNGLPLGARATEHYNKLIFTAAGKQLNKHLTVYQAVQRQVVHAEDDEDRFGGSDLPDDGNHFWDDIRGDVFTITYQKADNTAEKGSVGGSASVPKSSKSDSCRTLSEKQCTSLLDSILQGELPCDLEKSNQTYNILSLLHVLEGLNQLSPRLRLQSACDDFAEGKVATLNGLYDVGAKVPSKEFINSKMTPKLARQIQDVLALCSGSLPSWCYQLTKACPFLFPFETRRQYFYSTAFGLSRALHRLQQQPGNDNNTAFEREVRIGRLQRQKVRVSRNRILDSAAKVMEMFSNQKAVLEVEYFGEVGTGLGPTLEFYTLLSRELQRVDLGLWRSHSSDNSGMQIDANADDLIRSKNHESESLTESRNIVQSPLGLFPQPWPPTAAASEGSKFFKVVEYFRLVGRVMAKALQDGRLLDLPLSTAFYKLLLGQELDLYDILSFDTEFGKTLQELQILVARKQFLDSCSSESQKIDLCFRGAPVEDLYLDFTLPGYPEYVLKEGGENAEVNICNLEEYISLVVDATVKTGIMRQVEAFKAGFNQVFDISSLQIFSPQELDYLICGRCELWEPETLPEHIKFDHGYTSKSPAIINFLEIMAEFTPEQQHAFCQFVTGAPRLPPGGLAALNPKLTIVRKHSSVANNNSNATGATESADDDLPSVMTCANYLKLPPYSTKAIMLKKLLYAINEGQGSFDLS

SEQ ID NO: 83 - protein, 1833 aa, Zea mays
METRSSSRKRAAAAASSSASKRPRRNSSSSSSAPPRQQPPMEPSPSSRRRSRAAAADKGKDPDPASSDHPSPPAPDDDADVTFPQPFTSASTALQGLLRRLGAGLDDLLPSSSSAPSSATSGHLKRILAGLQAHGDESRQLQSLMQLCEMLSIGTEDSLAAFPVDAFVPILVGMLGREDEPATAGASPDVMLLAARALSNLVDVLPSSCSAVVHYGAIQCFCARLLTIEYMDLAEQSLQALKKISLEHPTACLRAGALMAVLSYLDFFSTGVQRVALSTAANICRKLPSDASEFVMEAVPLLTNLLNHHDSKVLEHASVCLTRIAEAFAYYPDKLDELCNHGLVAQAASLIAVGNSSGQTSLSTSTYTGLIRLLSICASGSLLAVKTLLLLGISGTLKDILSGSALISGTSVSPAVTRPADQMFEIVSLADDLLPHIPARIIKLPTYYHTYKGSSTKKSASIKQEGGGSTGNERSGRERLLREQPELLQQFGMDLLPTMTQVYGSSVNAPIRHKCLSIIGKLMYYSSAETIQSLLGTTNISSFLAGILAWKDPQVLIPALQIAEIMMEKLPETFSKLFVREGVVHAVESLICSESSNKMPSQVPPQDKDKDSAMPSRSRRQRRRAGAVAAENSSLDESNSSNLGVMCSTATASEAPNTSLRFTVSDHAKSFKDKYFPADTDSSDIGFTDDLLKLRALCAKLNTVSENVKTKAKGKSKAISTNFLDISIDVEEQLDKIISEMLSELSKVNGVSTFEFIRSGVVIALLDYLSCGTFGKEKVSEGNLSQLRQQALRRYKTFISVALSIDHGRDETPMALLVQKLQSALSSLERFPVVLSQSSRIGIGGSRLTSGLSALAQPFKLRLSRAQGEKSLRDYSSNIVLIDPFASLASVEEFLWPRVQRSEVASKPIIPSGNNSESGVPGTTAGASLTAAMAQSGRRPTTRSKSSAAGGLTSKKDSHDESTSTAKGKGKAIVKPNSDESKGPNTRNAAHQKSASEKDLEMKQAHGHSSSEDEELDTSPVEIDDALMIDDDDISDDDDDDDDDHEVLQEGSLPICSQDGVHDVKLGDADESNIGSATFSHAQPSSGSGARNTSSRGPDSTEFRSMGTFGSRGAMSFVAATMAGLASVGGRSVRGVRDRRGLSLGGSMNDHNKLIFTAGGKQLNKHLTVYQAIQRQLMLDEDDEERFNGSDIPNDGNRFWGDVFTITYQKADNQVEKGCQGTSTSLNIKSDSYRSISEAQGVSLLDSILQGELPCDLERTNSTYNILALLRILEGLNQLSPRLRVQGASDDFAEGKINTLDELYRTGAKVPSEVFVNSKLTPKLARQMQDVLALCSGSLPSWCYQMTKACPFLFPFETRRQYFYSTAFGLSRALNRLQQQQSDNHSSGGEREVRFGRLQRQKVRVSRNRILDSAAKVMEMFSSQRAVLEVEYFGEVGTGLGPTLEFYTLLSHELQCAQLGLWRATSSYDSGLHTDMKDVIRLDPEDGSSGKELNTDLPGDGMYLIQAPLGLFPRPWPPKVDTSEGSRFFKVLEYFRLIGQVIAKVLQDGRLLDLPLSTAFYKLILGQELDLFDIVSFDSEFGKTLQELQVLVERKQFLESTSGKNQLQVADLCFHGASIEDLCLDFTLPGYPDYVLKEGEGGTIVNIYNLEEYITLVVDATVKSGIKRQVEAFRSGFNQVFDMSSLHIFSPQELDYLICGRQEIWESESLVDNIKFDHGYTAKSPAIVNLLEILSEFTPEQQHAFCQFVTGAPRLPHGGLAALSPKLTIVRKHPSSAVNTSNSTGAVESADDDLPSVMTCANYLKLPPYSTKEIMRKKLLYAILEGRGSFDLS

SEQ ID NO: 84 - protein, 74 aa, Glycine max
SSSASAAVNTRSRASNTKEPLPPKNPPPPLPPMDSANESSGSRRDRRNNKENSSDKGKEKEHDVRIRDRDAALN

SEQ ID NO: 85 - protein, 68 aa, Glycine max
SSSSSASAAAAAASVSSVNTRSRSSRTKEPLPPKNPPPMDSANESSGSRRDRRNKDNSDKGKEKEHDV

SEQ ID NO: 86 - protein, 84 aa, Glycine max
DDNDSEGGVGILHQNLISASTFRGLLRKLGAGLDDLLPATAMGGSVPSSHQTGGLKQILSGLRADGEEGRQVEALTHLCDMLSI

SEQ ID NO: 87 - protein, 71 aa, Glycine max
GKEKEQDVRIRDAERERERALALNMESEDVGDDDDNDSDGGVGILHQNLTSASSALQGLLRKLGAGLDDLL

SEQ ID NO: 88 - protein, 58 aa, Glycine max
AANASSNGNGPSELADDDLPSVMTCANYLKLPPYSTKEIMYKKLLYAISEGQGSFDLS

SEQ ID NO: 89 - protein, 51 aa, Glycine max
AVNTSSNGNGPSESADDDLPSVMTCANYLKLPPYSTKEIMYKKLLYAINEG

SEQ ID NO: 90 - protein, 51 aa, Glycine max
AVNNSSNGNGPSESADDDLPSVMTCANYLKLPPYSTKEIMYKKLLYAISEG

SEQ ID NO: 91 - protein, 51 aa, Zea mays
VANNNSNATGATESADDDLPSVMTCANYLKLPPYSTKAIMLKKLLYAINEG

SEQ ID NO: 92 - protein, 51 aa, Zea mays
SAVNTSNSTGAVESADDDLPSVMTCANYLKLPPYSTKEIMRKKLLYAILEG

SEQ ID NO: 93 - protein, 22 aa, Glycine max
DDDLPSVMTCANYLKLPPYSTK

SEQ ID NO: 94 - DNA, 23 bp, Artificial sequence
  Synthetic oligonucleotide
tccttccccttgtcggaggagtt

SEQ ID NO: 95 - DNA, 23 bp, Artificial sequence
  Synthetic oligonucleotide
gggggcaagggttccttagtatt

SEQ ID NO: 96 - DNA, 23 bp, Artificial sequence
  Synthetic oligonucleotide
ttccgtgaacactcgctcccgtt

SEQ ID NO: 97 - DNA, 23 bp, Artificial sequence
  Synthetic oligonucleotide
ttgcggcgatcgcggcgggagcc

SEQ ID NO: 98 - DNA, 23 bp, Artificial sequence
  Synthetic oligonucleotide
atttctgccagtacctttcgagg

SEQ ID NO: 99 - DNA, 23 bp, Artificial sequence
  Synthetic oligonucleotide
cgtgccgatggggaagaaggtcg

SEQ ID NO: 100 - DNA, 23 bp, Artificial sequence
  Synthetic oligonucleotide
acgccaaggctcgctctcgctcc

SEQ ID NO: 101 - DNA, 23 bp, Artificial sequence
  Synthetic oligonucleotide
acgtctgccagtagtgcccttca

SEQ ID NO: 102 - DNA, 23 bp, Artificial sequence
  Synthetic oligonucleotide
ccaagtgtgatgacgtgtgcaaa

SEQ ID NO: 103 - DNA, 23 bp, Artificial sequence
  Synthetic oligonucleotide
cctagtgtgatgacatgtgctaa

SEQ ID NO: 104 - DNA, 23 bp, Artificial sequence
  Synthetic oligonucleotide
atggcatgaacagtcccttcaag

SEQ ID NO: 105 - DNA, 23 bp, Artificial sequence
  Synthetic oligonucleotide
tttcagcgggttgcattgtctac

SEQ ID NO: 106 - DNA, 23 bp, Artificial sequence
  Synthetic oligonucleotide
agcgggttgcattgtctactgct

SEQ ID NO: 107 - DNA, 23 bp, Artificial sequence
  Synthetic oligonucleotide
ttgatgtgagcagtctcttcaag

SEQ ID NO: 108 - DNA, 23 bp, Artificial sequence
  Synthetic oligonucleotide
atgtgagcagtctcttcaagcac

SEQ ID NO: 109 - DNA, 23 bp, Artificial sequence
  Synthetic oligonucleotide
cacatatttgcagcagtagacaa

SEQ ID NO: 110 - DNA, 23 bp, Artificial sequence
  Synthetic oligonucleotide
ttgcacatatttgcagcagtaga

SEQ ID NO: 111 - DNA, 23 bp, Artificial sequence
  Synthetic oligonucleotide
ttgatgtgaacagtctcttcaag

SEQ ID NO: 112 - DNA, 23 bp, Artificial sequence
  Synthetic oligonucleotide
atgtgaacagtctcttcaagcac

SEQ ID NO: 113 - DNA, 23 bp, Artificial sequence
  Synthetic oligonucleotide
gagagttgcattatctacagctg

SEQ ID NO: 114 - DNA, 23 bp, Artificial sequence
  Synthetic oligonucleotide
aggtactggagcatgcttctgtc

SEQ ID NO: 115 - DNA, 23 bp, Artificial sequence
  Synthetic oligonucleotide
tgcaaatatttgcagcggtagac

SEQ ID NO: 116 - DNA, 23 bp, Artificial sequence
  Synthetic oligonucleotide
gcaatgcgtgtcaaacaaacaga

SEQ ID NO: 117 - DNA, 23 bp, Artificial sequence
  Synthetic oligonucleotide
cctagtgtcatgacttgcgccaa

SEQ ID NO: 118 - DNA, 23 bp, Artificial sequence
  Synthetic oligonucleotide
cctagtgtgatgacgtgcgccaa

SEQ ID NO: 119 - DNA, 11119 bp, Artificial sequence
  Synthetic polynucleotide
gaggagcgtagctagttcagttccgtttgatgaacgaaaatgaccaatccaccgagcgaaattgtaattttcaacaataaaaaaggcaaagaaagttacatatgaaagcctgttttgttctgtccctttttattcttccctttctttcttacttacccctttccctggcttagggttttctgcccccctgaatcctcatcgctattcatgattacactccttacaattctcactcagcgactcgttcgaaatacgtgaaatccccttatctccaatttctagggtttcgattcattcaactcaccacaaagattggatccatggtagcgtgattggcgctcggtggcgagcgagttgataattatcgggttgggtggattttgtatggaaactcggagccggaagcgggcggaggcttcctcagctgccccttcatccccttcctctggtcccaccactcgttccagcaagcgtgcacgcctctcttcttcttcctccgcttccgccgccgctgccgccgcatccgtttcttccgtgaacactcgctcccgttcatcccggactaaggaacccttgccccctaagaatcctcctcccatggactctgccaatgaatcctctggctcccgccgcgatcgccgcaacaaagtccgacaaggggaaggagaaagagcatgatgttaggattagggacagggatgctgacagagggctggcattgaacatggatggtggcggagacgatgatgacaatgacagcgaaggcggtgtggggattttgcatcaaaacttgacctctgcgagtagtgcacttcaggggcttcttcggaaacttggtgctggtttggatgatctgcttccatcatcggctatgggttctgcgtcttcctctcaccagagtgggaggctgaaaaagatcctcttcggattgcgggcggatggcgaagaagggcggcaggttgaagcattgacacagctctgtgagatgctttcgattgggactgaagagtcacttagtacattctctgttgattcgtttgttcccgtgcttgtggggttgttgaatcacgagagcaaccctgacatcatgcttcttgctgccagagcattgacccatctctgtgatgtgctcccttcatcttgtgctgctgttgtgcattatggtgccgtgtcaatcttttgtgcgaggttgctcaccatagaatacatggacctggctgagcaggttgttccttggttcatgactattgtggaattaatgaaaatggtgctagaaagttataaaataaatatttgtgtttcagtgttgaaccctggtgctgcctaattgtttttaaaactatatatttcgatgtttctgggtcaaattttcagttgtagaagaattatgccttttttttttaatctaagacttagcattttgaaaatgaaattcatatagtttgattactgtatttgatggcatgaacagtcccttcaagctctgaagaagatatctcaggagcatcccactgcctgcctacgagcaggtgctcttatggccgtgctttcctatttggacttcttttcaacaggagttcaggtaaattgtcagtgaagtacctacatttagaggatgattgcatcccactggtccttttggacagtcataaatcatttggccacaggtgccattagtgagcaagtgtatgttgacattattctttgtttcagcgggttgcattgtctactgctgcaaatatgtgcaaaaagcttccttcagatgcagctgattttgtgatggaagctgttcctcttctgacaaaccttcttcagtaccatgattccaaggtaaggtcatgttttgttgcaagtcttgtcacataatggaaactgtatttttccttttgcatccataaacttgccttttaaggaagtttagcttgagaagagggaaattttgatccctatatcccatggtataaaatatttatctatagcttcaccttatgcattttcaatttttgtaggttctggagcacgcctctgtttgtttgactcgaatagctgaagcttttgcgtcatctccagacaaattagatgaattgtgcaaccatggacttgtaacacaagctgcctccctcatttctaacagcagttctgggggtggtcaggcttctctcagcacgccgacatatactgtaagtgcaatttttacttttagttagatgcattttgcctatagtttggtccttgacctgggtatatgcagggtttaatccgacttctttcaacttgtgcgagtggatctcctcttggagctaaaaccttactacttcttggaattagtggtattcttaaagatattctatctggttctggagtttcttctaaggcctctgtttctcctgcattaagtaggccgccagaacaggtatagtataacatcagaacttttcttttggtcattcatgtgtagttttatctcgtaatgttcattaaacagacactgaccttaaatccatcattattctaattcttggtttcaaatatatagatatttgagattgtaaacctcacgaatgagcttctgcctccattgccacatggaacaatttctctccctatcatctccaacatgtttttgaaagggcccattgtaaagaagtctcctgctggtagctctggaaaacaagaagacacaaatggaaatgttcctgagatatcggctcgtgagaaactattaaatgatcagcctgaactacttaagcaatttgcgatggatctccttccagttttaatacaggttgatatttgtgcatcaattgcttaaactttgcttgataaatttgttaaattgaaaaaaatgttctgataaattgctcctttgcttccttatttgtcttctttggttaattgatgatattggcttgctgttgatatagatatatggttctagtgtcaatggtcctgttcggcacaaatgcctttctgtcattggaaaattgatgtatttcagcacagcagagatgatccagtctttgttgagtgtgacaaatatatcaaggtatgttgaaatttaattgagttgatattgcttgataccctcactgattttatgggtttagaaaatttatgcattgttgctttgatcatatagtttcttagctggcgtcttagcatggaaagatccacatgttttgcttcctgccttgaaaattgctgaaattcttatggaaaagcttcctgggacattctccaagatgttcattagagaaggtgttgtgcatgcagtggaccaacttattttaactggaaattcgaccaatatctctacacaggcatcttctgccgagaaggataatgattctatatctggagcatcatctcgctctaggcgttatcggcgacgcagtgggaattccaatcctgatggaaatcctttggacgatttgaaaactccagtttcagtaaatgttggttcacctcctaattctgtggatatgccaacagtaaattccagtattcggttatctgttagtacagctgccaaagcttttaaagataagtattttccttcagatcctggggctgctgaagtgggtattactgatgatcttttgcatctgaaaaatctttgcatgaagttaaatgctggtgctgatgaacaaaggaccaatggaaaggggaaatctaaaacttctggatttggtctggaagagtatttaattgggatcatagctgacatgctaaaggaacttggcaaaggagatggggtatctacttttgaattcattggtagtggtgttgttgcagctctgttgaattatttttcttgtgggtatttctctaaagatcgaccattagaaacccaccttcccaagcttcgccaacaagcacttacaaggtttaagttatttatagctgttgcactaccttctactactgaagatgggactgtggctcctatgactgtcttggtccagaagcttcaaaatgccttgtcctccttggagcgtttccctgttgtgctgagtcattcatctaggtcatctagtgggagtgcacgcctctcctctggactaagtgcattatctcagcccttcaagttgcggctttgtcgagcccagggtgaaaggtcacttagggattattcatccaatgttgtactggttgatccattagcaagtttagcagcaattgaggaatttgtttggcctcgtatccaacgaagtgaattgggtcagaagtccactgtacctgctgggaattctgaatctgggacaactcctacaggagctggtgtatcctctccaactacccatcgccattctactagatccagatcatctgttaatataggtgatacatctagaaaggaaataagtcaagataaaagcacaagctcttccaagggtaagggaaaagctgtattaaagcctgcacaagaggaggcaagaggacctcagaccagaaatgctactcgcagaagagaagctcttgataaagatgctcaaataaagcctgtaaacggtgactctacttctgaggtatactgatggaaaccgagttaggggcagatatgacagttatctgtagaaaataactgctttagaaatcaattctgtataagaaactcaaataactgtcttagaaaacagtactgtattagaaactgcaggatggtagttatgtgtagaaaataactgctggtagttatgtattaggagtatatgtctgttagtatgtggtgtaattgggcagtgtaaagtcatttttaagtttgtggatagagaatactctgtaggagacttctgtctctgggacagctagtgctgttttttgtatatgataggagactttagtctctaggacggcaggtgtattgctgtatttgtatgtgataggagacttttgtctctgggacagcaagtgtattgctgtattgtgtgatttcagtgttctatatattttaggtaaatgctagggctctggttgaggaagtaaaaagagggatgcgtaaaaatgtactcctcctatgatttccaaaaaaaaacttttcttttttaattccttaaccagtgcctggcactggttagcaagaccctatattttattactttatcatttggtgttctatcatatactgtgaaatcctagcgatgactttacaatgcttcaacttttttcttctgttaatttataacttccttctggctatgtatgacctgactatgaatgctctgttttcatgttggcttataaagtgaaatacgaagagaatacttgataatgccaatataagatgtaaagatgcattattacatttttcattgcaagcttgaaaagacatcttacatttctctgtatctgtaactttggacatgctggattttgttgtctgtagatccttaaaatgttacctctgccatttagttttataaatggtttttgattataattatctatttaagatatcatctctaatatgagaaacactgcctaggttttctttggattatgttgaacagttgcttttttgcaccattgatttctttacatacattaaaattaagctgttgtaaggtttccctgcaaaagtgttgatttactaaaaaattgaggcagagctagcactgagaggataacttatctattttgcgttgaagtaacattgctgtaagtaatagtgtatttggatgtaatcagatggatactttgtatatgctgatcctcatccttctttcattaagtgcatgtgtcagaatttttagtatggtaccactcaaaaagtcaaaatcgattcctattttcagtttagcttagtttttaattattttcttataacattaaacttgtctgtcatgaagttgtagtttgtatgactctcattggggaatattttagattatttgtgggcgggttacatattttttccgtttaggtgaagctttcttgttttgttttttgttgcttttgattatggcagtgtttacatgcatgttgtttagctaggttcttgtggttgttaaactggtggaagcatctttgagtataaattttttttttggaaggcgtctttgagtataaatattagtcatttgtttttcctgctatgctttggactaaatcatgaacctaatccaagtatcttgaagtagtcatttgtttttccttttctttttttacccttctagtgacattttccaatgtctacattgtaggatgaagatttggatatatcccctgttgagattgatgaggcattggtgattgaagatgatgatatttctgatgatgaagatgatgaccatgatgatgtatgttatctactgtttcttcttctttggctaggattttcttacttccttggtgatgagtatctcatttaagtaattactgtgtttctgtcttttttttttttttgcttttctgacatcatttccttttttaacatggcttttaaatatgttaaaatctgtgtgcatctttatttttttatttccagtgctggtgtccttcaatcttgtttacaattttttcaaaatgagttgctgctgtctttctatcatttctttgttttctatttttcttttctgggtataatgatgcaatgaagttttggtttatgaccttatgcaaactatccataatccaagtctctgaccaatagctcaatcctggtgttttatttccaaatttttaattttagctaccatcattattgttaaccaagattgaacattataattaaattcagttgtatctattaaaatttttgtgcttgttttgttttttctgatgcacaggtactgagggatgattctcttcctgtttgttcacctgacaaagtacatgatgtgaaattgggcgacatagtggaggagagtaatgttgctcctgcaactagtgatggtggccagactaatgctgcctcaggttctagtagcaaagctggtacagtcaggggatcagactctgctgattttaggagtggctatacctcaagctcaagaggtgcaatgtcatttgctgctgctgctatggctggacttggatctgccaatagcagaggtatcaggggtggaagagatcgactagggcgtccattgtttggtagttctaatgatcctccaaagttgatatttactgctggtgggaagcagcttaataggcatttgactatttatcaggcaattcaaaggcagcttgtgctagatgaagatgatgaggagagatttgctggcagtagtgactatgtatccagtgatggaagcaggttgtggggtgatatttatactataacttatcagagggcagagaaccagacagataggactccccctggaggttcaacctctaatgcttcaaaatctggcaaatctgggtctgtattgaattctagttctgaagacaagctaaatcagacatctgtattagatagtattttgcagggagaattgccctgtgaactggagaaatctaatcctacatacaatatattggcattattgcgggtgcttgagggtttgaaccaacttgcatctcgtttgagggcccaagtggttactgatagctttgcagagggaaaaattttggatttagttgagctaagttttaccagtggtgctagggttcctacagaggaatttataagcagcaaacttactccaaaattagctaggcaaatacaagatgcccttgccttatgtagtgggagtcttccctcatggtgttaccagttatctaaagcgtgcccttttttgtttccttttgagacccggcgacagtatttttattcaactgcctttgggttatctcgtgcattgtatcgccttcagcagcagcagggtgctgatggtcatggatcaacaaatgaaagagaggtcagggttgggagattgcagcgtcaaaaggttcgtgtctctcgaaatcgcattttggattctgctgctaaggtgatggagttgtattctagtcaaaaggctgtacttgaagtagaatattttggtgaagttggcaccggtctgggtcccactctggagttctacacacttctcagtcatgacttacaaaaagttgtacttcaaatgtggagatcaggttcttcagagaaatatcaaatggaaattgatggagatgaaaagaaaatgaaaaatagtgaaggctcttttgttggagatggagaactcgttcaagctcctcttgggctgtttcctcgaccttggcctgcaaatgctgatgcatcagagggtacccaaattttcaaagtgattgaatatttccgattattaggccgtgtaatggctaaagctcttcaagatggacgcttattggatttaccattgtcagtggcattttataagcttgttcttggtcaagtaagttatgaaatgttgatgtcttgtctgatttcatgtgtatcttaaggttgatttttagtctctatatatttagcctttgatatattgcaggagcttgatttgcatgacattcttttcattgatgctgaacttgggaaaactttgcaagagttaaatgcccttgtttgccggaaatgttttatagaatctattggtggtagctacactgatacctttgctaatttgcattttcgtggggccccaatagaagatctctgcttggacttcacacttcctggttatccagagtacatcttgaaacctggagatgaaattgtatgtattcagtctgttttttttacctggtttttgttttggttctgattctgtctgtaataaaaattgctttgaacttactgtcaaactttcaggttgacatcaataatctagaggagtacatatccatggtggttgaggcaacggttaagactggaatcatgcgtcaaatggaagcttttagagcagggtttaatcaggttatatgttgtctcaataaattcatgtaactttgtctttgactgtgcatcttgtttggtgatgctgagtataaaaaatatcatgtattttttaactgattaatggttcattctttttggtattccttttctagtttctctcaaacaattttattgaaaactaaacttgactggggtttaatttgaaaatattgagtatggatttttcagcttttagattcttaaggggcattgttttctactaaaaattgttacttttggttatgtcttgagcagtgaactgtatatatatcctgaatctcggatgtatcaattaagaaattactaaatgtttgtttctgacttttacttatgtttgctaccaaccttgtatcccccttcccctgcagatgaagaatggaagttagaaaatacacattttttttgtattgatgtcaaatattcagttatttaatgtcaaaattttacaagtgaaatgagctactagcctaacttatatggaagagatgggctgggcaatagtttgaacttggaacaactagttggataatttgttcatttgcttgagtccaaaaactaaacatttgtcactttcccacttgttcttgtcaattcaggtttttgacatctcatctttacaaattttttctccccaagaactggattacttgctttgcggccggagagaattgtggaaggtattcttttttatacaaaagtattactgctgcttacaacaatcttttagatgttaccatggataatgtagttataattttttttctcctatctgcagactgagacactagctgatcatataaaatttgaccatggttatactgccaagagccctgccatagttaatgtatgtttttttattcctgtagaaggacaattgtgtttttggaaatttaggcttgttatatttggtgctgaacctgtatgatgctattttcagttactcgaaattatgggagaattcacaccagagcagcagcgtgccttctgtcaatttgttactggtgcacctaggctgcctcctggtggactggcagttctaaatccaaaattaacgattgtgaggaaggtattgaaaaatatttttgatcacttgcaacctgtgttattcattcatgccttcatgcaattttgtacttgatatcttgaatgttaaagttttttggggggcgaggatctatttgaacttcggtagcaagatgtgtctggatttactgcctgacatatgttgctccactattcctttacctcttgaaggggggttttcaaaatgcaatgttagtaagtgattacatttacatgtctgggtgcagctttcgtcaagtgcagctaatgcttcatctaacgggaatgggccttcagaattagcagatgatgacttgccaagtgtgatgacgtgtgcaaattacctgaagcttcctccttattctaccaaggtagaacactgcaaagcattgttggttatatgatcatgcatgtcaaagtgtcttttgatctttgatttccattttaaaacaggaaattatgtacaagaagctactctatgcaatcagtgaaggccagggatcctttgatttatcatgagttctggaactacccaacccggccctgtatgttaatatgatgatgaatcagggtttactcgagacttaattattttttggttgcatgtactttcctccctgcttctcaaaataatggcctctctcgggtcacgcacatcaaaggtggtgacatggttcaggtgagtttaccattgttgtgaaacctcactatgattcttgacattactagaccattgttgtgagcttaccaagagcctcttattattttgttcattttcatttgttggtaaactaaattaatattaattctttgattattggcagttgaatcagatcgcctcgtttttaaaggtgtaaaggaatttgcggagctcgttttagctgttacatgtaaatagaataggaatgttgagtaattccctcccaaatttttcatcattctgttttcaactcaaagtattggcagttagttatcatacctgtatggaagatggtaaaaggaatagaaataatatcgtatactatgctttatgatttcatgttagatctgttacgagcttttgttgaggtaaaatgcgaattattctatgcttgtttgctatgattgtcccaaaatgaggcgttctagcataaataagtactgtttgagttaccgatt

SEQ ID NO: 120 - DNA, 11114 bp, Artificial sequence
  Synthetic polynucleotide
gaggagcgtagctagttcagttccgtttgatgaacgaaaatgaccaatccaccgagcgaaattgtaattttcaacaataaaaaaggcaaagaaagttacatatgaaagcctgttttgttctgtccctttttattcttccctttctttcttacttacccctttccctggcttagggttttctgcccccctgaatcctcatcgctattcatgattacactccttacaattctcactcagcgactcgttcgaaatacgtgaaatccccttatctccaatttctagggtttcgattcattcaactcaccacaaagattggatccatggtagcgtgattggcgctcggtggcgagcgagttgataattatcgggttgggtggattttgtatggaaactcggagccggaagcgggcggaggcttcctcagctgccccttcatccccttcctctggtcccaccactcgttccagcaagcgtgcacgcctctcttcttcttcctccgcttccgccgccgctgccgccgcatccgtttcttccgtgaacactcatcccggactaaggaacccttgccccctaagaatcctcctcccatggactctgccaatgaatcctctggctcccgccgcgatcgccgcaacaaagacaactccgacaaggggaaggagaaagagcatgatgttaggattagggacagggatgctgacagagggctggcattgaacatggatggtggcggagacgatgatgacaatgacagcgaaggcggtgtggggattttgcatcaaaacttgacctctgcgagtagtgcacttcaggggcttcttcggaaacttggtgctggtttggatgatctgcttccatcatcggctatgggttctgcgtcttcctctcaccagagtgggaggctgaaaaagatcctcttcggattgcgggcggatggcgaagaagggcggcaggttgaagcattgacacagctctgtgagatgctttcgattgggactgaagagtcacttagtacattctctgttgattcgtttgttcccgtgcttgtggggttgttgaatcacgagagcaaccctgacatcatgcttcttgctgccagagcattgacccatctctgtgatgtgctcccttcatcttgtgctgctgttgtgcattatggtgccgtgtcaatcttttgtgcgaggttgctcaccatagaatacatggacctggctgagcaggttgttccttggttcatgactattgtggaattaatgaaaatggtgctagaaagttataaaataaatatttgtgtttcagtgttgaaccctggtgctgcctaattgtttttaaaactatatatttcgatgtttctgggtcaaattttcagttgtagaagaattatgccttttttttttaatctaagacttagcattttgaaaatgaaattcatatagtttgattactgtatttgatggcatgaacagtcccttcaagctctgaagaagatatctcaggagcatcccactgcctgcctacgagcaggtgctcttatggccgtgctttcctatttggacttcttttcaacaggagttcaggtaaattgtcagtgaagtacctacatttagaggatgattgcatcccactggtccttttggacagtcataaatcatttggccacaggtgccattagtgagcaagtgtatgttgacattattctttgtttcagcgggttgcattgtctactgctgcaaatatgtgcaaaaagcttccttcagatgcagctgattttgtgatggaagctgttcctcttctgacaaaccttcttcagtaccatgattccaaggtaaggtcatgttttgttgcaagtcttgtcacataatggaaactgtatttttccttttgcatccataaacttgccttttaaggaagtttagcttgagaagagggaaattttgatccctatatcccatggtataaaatatttatctatagcttcaccttatgcattttcaatttttgtaggttctggagcacgcctctgtttgtttgactcgaatagctgaagcttttgcgtcatctccagacaaattagatgaattgtgcaaccatggacttgtaacacaagctgcctccctcatttctaacagcagttctgggggtggtcaggcttctctcagcacgccgacatatactgtaagtgcaatttttacttttagttagatgcattttgcctatagtttggtccttgacctgggtatatgcagggtttaatccgacttctttcaacttgtgcgagtggatctcctcttggagctaaaaccttactacttcttggaattagtggtattcttaaagatattctatctggttctggagtttcttctaaggcctctgtttctcctgcattaagtaggccgccagaacaggtatagtataacatcagaacttttcttttggtcattcatgtgtagttttatctcgtaatgttcattaaacagacactgaccttaaatccatcattattctaattcttggtttcaaatatatagatatttgagattgtaaacctcacgaatgagcttctgcctccattgccacatggaacaatttctctccctatcatctccaacatgtttttgaaagggcccattgtaaagaagtctcctgctggtagctctggaaaacaagaagacacaaatggaaatgttcctgagatatcggctcgtgagaaactattaaatgatcagcctgaactacttaagcaatttgcgatggatctccttccagttttaatacaggttgatatttgtgcatcaattgcttaaactttgcttgataaatttgttaaattgaaaaaaatgttctgataaattgctcctttgcttccttatttgtcttctttggttaattgatgatattggcttgctgttgatatagatatatggttctagtgtcaatggtcctgttcggcacaaatgcctttctgtcattggaaaattgatgtatttcagcacagcagagatgatccagtctttgttgagtgtgacaaatatatcaaggtatgttgaaatttaattgagttgatattgcttgataccctcactgattttatgggtttagaaaatttatgcattgttgctttgatcatatagtttcttagctggcgtcttagcatggaaagatccacatgttttgcttcctgccttgaaaattgctgaaattcttatggaaaagcttcctgggacattctccaagatgttcattagagaaggtgttgtgcatgcagtggaccaacttattttaactggaaattcgaccaatatctctacacaggcatcttctgccgagaaggataatgattctatatctggagcatcatctcgctctaggcgttatcggcgacgcagtgggaattccaatcctgatggaaatcctttggacgatttgaaaactccagtttcagtaaatgttggttcacctcctaattctgtggatatgccaacagtaaattccagtattcggttatctgttagtacagctgccaaagcttttaaagataagtattttccttcagatcctggggctgctgaagtgggtattactgatgatcttttgcatctgaaaaatctttgcatgaagttaaatgctggtgctgatgaacaaaggaccaatggaaaggggaaatctaaaacttctggatttggtctggaagagtatttaattgggatcatagctgacatgctaaaggaacttggcaaaggagatggggtatctacttttgaattcattggtagtggtgttgttgcagctctgttgaattatttttcttgtgggtatttctctaaagatcgaccattagaaacccaccttcccaagcttcgccaacaagcacttacaaggtttaagttatttatagctgttgcactaccttctactactgaagatgggactgtggctcctatgactgtcttggtccagaagcttcaaaatgccttgtcctccttggagcgtttccctgttgtgctgagtcattcatctaggtcatctagtgggagtgcacgcctctcctctggactaagtgcattatctcagcccttcaagttgcggctttgtcgagcccagggtgaaaggtcacttagggattattcatccaatgttgtactggttgatccattagcaagtttagcagcaattgaggaatttgtttggcctcgtatccaacgaagtgaattgggtcagaagtccactgtacctgctgggaattctgaatctgggacaactcctacaggagctggtgtatcctctccaactacccatcgccattctactagatccagatcatctgttaatataggtgatacatctagaaaggaaataagtcaagataaaagcacaagctcttccaagggtaagggaaaagctgtattaaagcctgcacaagaggaggcaagaggacctcagaccagaaatgctactcgcagaagagaagctcttgataaagatgctcaaataaagcctgtaaacggtgactctacttctgaggtatactgatggaaaccgagttaggggcagatatgacagttatctgtagaaaataactgctttagaaatcaattctgtataagaaactcaaataactgtcttagaaaacagtactgtattagaaactgcaggatggtagttatgtgtagaaaataactgctggtagttatgtattaggagtatatgtctgttagtatgtggtgtaattgggcagtgtaaagtcatttttaagtttgtggatagagaatactctgtaggagacttctgtctctgggacagctagtgctgttttttgtatatgataggagactttagtctctaggacggcaggtgtattgctgtatttgtatgtgataggagacttttgtctctgggacagcaagtgtattgctgtattgtgtgatttcagtgttctatatattttaggtaaatgctagggctctggttgaggaagtaaaaagagggatgcgtaaaaatgtactcctcctatgatttccaaaaaaaaacttttcttttttaattccttaaccagtgcctggcactggttagcaagaccctatattttattactttatcatttggtgttctatcatatactgtgaaatcctagcgatgactttacaatgcttcaacttttttcttctgttaatttataacttccttctggctatgtatgacctgactatgaatgctctgttttcatgttggcttataaagtgaaatacgaagagaatacttgataatgccaatataagatgtaaagatgcattattacatttttcattgcaagcttgaaaagacatcttacatttctctgtatctgtaactttggacatgctggattttgttgtctgtagatccttaaaatgttacctctgccatttagttttataaatggtttttgattataattatctatttaagatatcatctctaatatgagaaacactgcctaggttttctttggattatgttgaacagttgcttttttgcaccattgatttctttacatacattaaaattaagctgttgtaaggtttccctgcaaaagtgttgatttactaaaaaattgaggcagagctagcactgagaggataacttatctattttgcgttgaagtaacattgctgtaagtaatagtgtatttggatgtaatcagatggatactttgtatatgctgatcctcatccttctttcattaagtgcatgtgtcagaatttttagtatggtaccactcaaaaagtcaaaatcgattcctattttcagtttagcttagtttttaattattttcttataacattaaacttgtctgtcatgaagttgtagtttgtatgactctcattggggaatattttagattatttgtgggcgggttacatattttttccgtttaggtgaagctttcttgttttgttttttgttgcttttgattatggcagtgtttacatgcatgttgtttagctaggttcttgtggttgttaaactggtggaagcatctttgagtataaattttttttttggaaggcgtctttgagtataaatattagtcatttgtttttcctgctatgctttggactaaatcatgaacctaatccaagtatcttgaagtagtcatttgtttttccttttctttttttacccttctagtgacattttccaatgtctacattgtaggatgaagatttggatatatcccctgttgagattgatgaggcattggtgattgaagatgatgatatttctgatgatgaagatgatgaccatgatgatgtatgttatctactgtttcttcttctttggctaggattttcttacttccttggtgatgagtatctcatttaagtaattactgtgtttctgtcttttttttttttttgcttttctgacatcatttccttttttaacatggcttttaaatatgttaaaatctgtgtgcatctttatttttttatttccagtgctggtgtccttcaatcttgtttacaattttttcaaaatgagttgctgctgtctttctatcatttctttgttttctatttttcttttctgggtataatgatgcaatgaagttttggtttatgaccttatgcaaactatccataatccaagtctctgaccaatagctcaatcctggtgttttatttccaaatttttaattttagctaccatcattattgttaaccaagattgaacattataattaaattcagttgtatctattaaaatttttgtgcttgttttgttttttctgatgcacaggtactgagggatgattctcttcctgtttgttcacctgacaaagtacatgatgtgaaattgggcgacatagtggaggagagtaatgttgctcctgcaactagtgatggtggccagactaatgctgcctcaggttctagtagcaaagctggtacagtcaggggatcagactctgctgattttaggagtggctatacctcaagctcaagaggtgcaatgtcatttgctgctgctgctatggctggacttggatctgccaatagcagaggtatcaggggtggaagagatcgactagggcgtccattgtttggtagttctaatgatcctccaaagttgatatttactgctggtgggaagcagcttaataggcatttgactatttatcaggcaattcaaaggcagcttgtgctagatgaagatgatgaggagagatttgctggcagtagtgactatgtatccagtgatggaagcaggttgtggggtgatatttatactataacttatcagagggcagagaaccagacagataggactccccctggaggttcaacctctaatgcttcaaaatctggcaaatctgggtctgtattgaattctagttctgaagacaagctaaatcagacatctgtattagatagtattttgcagggagaattgccctgtgaactggagaaatctaatcctacatacaatatattggcattattgcgggtgcttgagggtttgaaccaacttgcatctcgtttgagggcccaagtggttactgatagctttgcagagggaaaaattttggatttagttgagctaagttttaccagtggtgctagggttcctacagaggaatttataagcagcaaacttactccaaaattagctaggcaaatacaagatgcccttgccttatgtagtgggagtcttccctcatggtgttaccagttatctaaagcgtgcccttttttgtttccttttgagacccggcgacagtatttttattcaactgcctttgggttatctcgtgcattgtatcgccttcagcagcagcagggtgctgatggtcatggatcaacaaatgaaagagaggtcagggttgggagattgcagcgtcaaaaggttcgtgtctctcgaaatcgcattttggattctgctgctaaggtgatggagttgtattctagtcaaaaggctgtacttgaagtagaatattttggtgaagttggcaccggtctgggtcccactctggagttctacacacttctcagtcatgacttacaaaaagttgtacttcaaatgtggagatcaggttcttcagagaaatatcaaatggaaattgatggagatgaaaagaaaatgaaaaatagtgaaggctcttttgttggagatggagaactcgttcaagctcctcttgggctgtttcctcgaccttggcctgcaaatgctgatgcatcagagggtacccaaattttcaaagtgattgaatatttccgattattaggccgtgtaatggctaaagctcttcaagatggacgcttattggatttaccattgtcagtggcattttataagcttgttcttggtcaagtaagttatgaaatgttgatgtcttgtctgatttcatgtgtatcttaaggttgatttttagtctctatatatttagcctttgatatattgcaggagcttgatttgcatgacattcttttcattgatgctgaacttgggaaaactttgcaagagttaaatgcccttgtttgccggaaatgttttatagaatctattggtggtagctacactgatacctttgctaatttgcattttcgtggggccccaatagaagatctctgcttggacttcacacttcctggttatccagagtacatcttgaaacctggagatgaaattgtatgtattcagtctgttttttttacctggtttttgttttggttctgattctgtctgtaataaaaattgctttgaacttactgtcaaactttcaggttgacatcaataatctagaggagtacatatccatggtggttgaggcaacggttaagactggaatcatgcgtcaaatggaagcttttagagcagggtttaatcaggttatatgttgtctcaataaattcatgtaactttgtctttgactgtgcatcttgtttggtgatgctgagtataaaaaatatcatgtattttttaactgattaatggttcattctttttggtattccttttctagtttctctcaaacaattttattgaaaactaaacttgactggggtttaatttgaaaatattgagtatggatttttcagcttttagattcttaaggggcattgttttctactaaaaattgttacttttggttatgtcttgagcagtgaactgtatatatatcctgaatctcggatgtatcaattaagaaattactaaatgtttgtttctgacttttacttatgtttgctaccaaccttgtatcccccttcccctgcagatgaagaatggaagttagaaaatacacattttttttgtattgatgtcaaatattcagttatttaatgtcaaaattttacaagtgaaatgagctactagcctaacttatatggaagagatgggctgggcaatagtttgaacttggaacaactagttggataatttgttcatttgcttgagtccaaaaactaaacatttgtcactttcccacttgttcttgtcaattcaggtttttgacatctcatctttacaaattttttctccccaagaactggattacttgctttgcggccggagagaattgtggaaggtattcttttttatacaaaagtattactgctgcttacaacaatcttttagatgttaccatggataatgtagttataattttttttctcctatctgcagactgagacactagctgatcatataaaatttgaccatggttatactgccaagagccctgccatagttaatgtatgtttttttattcctgtagaaggacaattgtgtttttggaaatttaggcttgttatatttggtgctgaacctgtatgatgctattttcagttactcgaaattatgggagaattcacaccagagcagcagcgtgccttctgtcaatttgttactggtgcacctaggctgcctcctggtggactggcagttctaaatccaaaattaacgattgtgaggaaggtattgaaaaatatttttgatcacttgcaacctgtgttattcattcatgccttcatgcaattttgtacttgatatcttgaatgttaaagttttttggggggcgaggatctatttgaacttcggtagcaagatgtgtctggatttactgcctgacatatgttgctccactattcctttacctcttgaaggggggttttcaaaatgcaatgttagtaagtgattacatttacatgtctgggtgcagctttcgtcaagtgcagctaatgcttcatctaacgggaatgggccttcagaattagcagatgatgacttgccaagtgtgatgacgtgtgcaaattacctgaagcttcctccttattctaccaaggtagaacactgcaaagcattgttggttatatgatcatgcatgtcaaagtgtcttttgatctttgatttccattttaaaacaggaaattatgtacaagaagctactctatgcaatcagtgaaggccagggatcctttgatttatcatgagttctggaactacccaacccggccctgtatgttaatatgatgatgaatcagggtttactcgagacttaattattttttggttgcatgtactttcctccctgcttctcaaaataatggcctctctcgggtcacgcacatcaaaggtggtgacatggttcaggtgagtttaccattgttgtgaaacctcactatgattcttgacattactagaccattgttgtgagcttaccaagagcctcttattattttgttcattttcatttgttggtaaactaaattaatattaattctttgattattggcagttgaatcagatcgcctcgtttttaaaggtgtaaaggaatttgcggagctcgttttagctgttacatgtaaatagaataggaatgttgagtaattccctcccaaatttttcatcattctgttttcaactcaaagtattggcagttagttatcatacctgtatggaagatggtaaaaggaatagaaataatatcgtatactatgctttatgatttcatgttagatctgttacgagcttttgttgaggtaaaatgcgaattattctatgcttgtttgctatgattgtcccaaaatgaggcgttctagcataaataagtactgtttgagttaccgatt

SEQ ID NO: 121 - DNA, 10728 bp, Artificial sequence
  Synthetic polynucleotide
atggaaactcggagccggaagcgggcggaggcttcctcagctgccccttcatccccttcctctggtcccaccactcgttcaagcaagcgcgcacgtctctcttcttcttcttccgcttccgccgccgtgaacactcggtcccgtgaaggaacccttgccccctaaaaatccccctcctcctcttcctcccatggactctgccaacgaatcctctggctcccgccgtgatcgccgcaacaacaaagaaaactcctccgacaaggggaaggagaaagagcatgatgtcaggattagggacagggatgcggcattgaacatggatggcagtggtggagacgaggacgatgacaatgacaatgacagtgaaggcggtgtggggattttgcatcaaaacttgacctctgcgagtagtgcacttcaggggcttcttcggaaactcggtgctggtttggatgatctgcttccatcgtcggctatgggctctgcatcttcctctcaccagagtgggaggctgaaaaagatcctctttggattgcgggctgacggcgaagaagggcggcaggtcgaagcattgacacagctctgtgagatgctttcgattgggactgaagaatcgcttagtacattctctgttgattcgtttgttcctgtgctcgtggggttgttgaatcacgagagcaaccctgacatcatgcttcttgctgccagagcattgacccatctctgcgatgtgctcccttcatcttgtgctgcggttgtgcattatggtgcagtctcaatcttttgtgccaggttgctcacaatagaatacatggacttggctgagcaggttgttctttaatgggaatggtgttagaagaaacttatgaaatataaatatttgtcttgaactctggtgctgcctaattgttttttaaaactatgtatattgcaatgtttctgggttcagttgtagaagaatcatgcattttgaaaatgaaattcttatagtttgattactgtgtttgatggcatgaacagtcccttcaagctttgaagaagatctctctggagcatcccactgcctgcctacgagcaggtgctcttatggccgtgctttcttatttggacttcttttcaacaggagttcaggtaaattgtcagtgaagtacctaaatttagaggatgattatattatatggtccttttggatagtcataaatcatttggccacagatgcctttagtgagcaagtgtgtgtatgttgacattattctttgtttcagcgggttgcattgtctactgctgcaaatatgtgcaagaagcttccttcagatgcagctgattttgtgatggaagctgttcctcttctgacaaaccttcttcagtaccatgattccaaggtaaggtcatgttttttgttttaagtcttgtcacataatggaaactgtatttttccttttgcatctataacttttcccgttaaggaagttttttttagcttgagaggagggagattttgatccctgtatcccatagtataaaatatttttctatagcttcaccttatgcattatcaatttttgtaggttctggagcacgcctctgtttgtttgactcgaatagctgaagcttttgcatcatctccagacaaattagatgagttgtgcaaccatggacttgtaacacaagctacctccctcatttctaacagcagttctggaggtggtcaggcttctctcagcacaccgacatataccgtgagtgcaatttttactttaagtcggatgcattttgcatgtagttttggtccttgacttgggcatatgcagggtttaatccgacttctttcaacttgtgcgagtggatccctcttggagctaaaaccttattacttcttggaattagtggtattcttaaagatattctatctggttctggagtttcttctaatgcctctgtttctctgcattaagtaggccaccagaacaggtatagtataacaccagaacttttcttttagtcattcatgtgtagttttatctcgtaatgttcattaagcagcctttgaccttaaatacaccattatttagatccttgatatttccagttctcttacatttgtgaaggaatgaaattattctaattctctgtttcaaatatatagatatttgagattgtaaacctggcgaatgagcttctgcccccattgccacatggaacaatttctctccctatcatctccaacatgtttttgaaagggcccattgtaaagaagtctccttctggtagctctgggaaacaagaagacactaatggaaatgttcctgagatatcggctcgtgagaaactattaaatgatcagcctgaactacttaagcaatttgcgatggatctcctcccagttttaatacaggttgacatttgtgcattgatcatttgcttaaattttgcttgataaatttgttaaattaaaaaagaagttctgatattgctcctttgcttccttatttatcttctttggttaattgatggtattggcttgcttttgatacagatatatggttctagtgtcaatggtcctgttcggcacaaatgcctttctgtcattgggaaattgatgtatttcagcacggcagagatgatccagtctttgttgagtgtgacaaatatatcaaggtatgtagaagtttaattgggttgatattgcttgatatcctactgattttatgggtttagaaaatttatgcattgttgctttgatcatatagtttcttagctggcgtcctagcatggaaagatccacatgttttgcttcctgccttgaaaattgctgaaattcttatggaaaagcttcccgggacattctccaagatgttcattagagaaggtgttgtgcatgcagtggaccaacttattttagcctcaaattcaaccaatatctctacacaggcatctcctgctgagaaggataatgattctatatctggagcatcatctcgctctaggcgttatcggcgacggagtgggaattccaatcccgatggaaatcctttggacgatttgaaaactccagtttcagtaaatgttggttcacctccaagttctgtggatatgccaacattaaattccagtattcggttatctgttagtacagctgccaaagcttttaaagataagtactttccttcagatcctggggctgctgaagtgggtattactgatgatcttttgcatctgaaaaatctttgcatgaagttaaatgctggtgatgatgaacaaaggactaatggaaagggggaatctaaaacttctggatttggtccggaagagtatttaattgggatcatagctaacatgctaaaggaacttggcaaaggagatggtgtatctacttttgaattcattggtagtggtgttgttgcagctctgttgaattatttttcttgtgggtatttctctaaagatcgaccattagaaacccaccttcccaagcttcgccaacaagcacttacaaggtttaagttatttatagcagttgcactaccttctactattgaagttgggactgtggctcctatgactgtcttggtccagaagcttcaaaatgccttgtcctccttggagcgtttccctgttgtgctgagtcattcatctaggtcatctagtgggagtgcacgcctctcctctggactaagtgctttatctcagcccttcaagttgcggctttgtcgagcccagggtgaaaagtcacttagggattattcatccaacgttgtactggttgatccattagcaagtttagcagcgattgaggaatttgtttggcctcgtatccaacgtagtgaatctggtcagaagtccactgtagccactgggaattctgaatctgggacaactcctgcaggagctggtgtatcctctcctactacccgtcgccattctactagatccagatcatctgttaatataggtgatacatctagaaaggaaataactcaagataaaagtacaagttcttccaagggtaagggaaaagttgtattaaagcctgcacaagaggaggcaagaggacctcagaccagaaatgctactcgcagaagagcagctcttgataaagatgctcaaatgaagcctgtaaacgctgactctacttctgaggtataccgatgtaaactgagttagggactgttatgacagttatctgtagagaataactgctttagaaatcaatgttagaaactcaaatatctgtcttagaaaacagtactgtattagaaacttcaggatagtagttatgtatttggagtatatgtctgttagtatgtggttttaattaggcagtttaaagttatttttaagttcgtggacagagaatactctgtaggagacttctgtctctgggacagtaagtgctgtttttgtatgtgataggagactctagtctttagtacagcaaatgtattgctgtatttgtatgtgataggaaacttttgtctctgggacagcaagtgtattgctgtattgtgtgtgatttaagtgttctatatattttaggcaaatgctagggcgctgtttgaggaagtaaaaagggaaagttttttattgggatgcgtaaaatgcactccccctatattttatttctttactttatcatttggtgttctatcatatactttgaaatcctagcgatgagtttacaatgctacaacttttttcttctgttaatttataactttcagttatttagtttttgttggatggttttcttcttttgctctccacttccttctggctatgtatgatctgactatgaatgttgctgttttcatgttggtttatacagtgaaatatgaggagaatacttaataatgccaatataaggtgtaaagatgcattattagattttgcatcgcaagcttgaaaagtcatctggaatttctctgcaactttggacacactggattttgttgtctgtagatccttgaaatgttttacctctgccatttagttttataaatggcttttggttacaattatctatttagatatatctcttatgtgagaaacactacctaagtgttcttttgattattatgttgaacagttgcttttttgcaccattgatttctttacatacattaaaattaagctgttataagatttccctgcaaaagtgttgagttactacaaaagtgaggaacattgccaagcctcatccttctagcattaagtgtatgtgtcaggattgttttagattatttgtgggtgggttgcatattttttctatttaggttatacttgttttgtttttcattgcttttgattatggcagtgtttacatgcatgttgtttagctaggttcttgtggttgttaaactggtggaaggatctttagagtataaaatacaacacacattctatatgcagttgatagggctcaacttggctgctaaactcatctttttactgctatgctttggactaaatcatgaacctaatccaagtatcctgaagtatctaaatattagtctcttgttttttcttttctttttttacccttctattgacatttttcattgtctacattgtaggatgaagatttggatatatcccctgttgagattgatgaggcattggtgattgaagatgacgatatttctgatgatgaagatgatgaccacgaagatgtatgttatctactgttttgtctacttttcttacttggtgatgagtatcacatttaagtaattactgtgttactgtaatttttttttttgcttttctgacaacccccagctttttctacgtttaacacggcttttaatatattaaaatctatttttggctaccaacgctggtgtccttcaatcttgtttacatttttttcaaaatgatatgctgctgtctttgtatcatttctttgctttctattttttcttctgggtataatgatgcaatgaagttttagtttatgatcttatgcgaactatccaagcctctgaccaatagctcaatctaggtgttttatttccaaaattttaattttagctaccatcattattgttaaccaagattgaatgttatagttaaattcagttgtatctattcttaaaatattggtgcttgttttatttttattgatgcaggtactgagggatgattctcttcctgtttgttcacctgacaaagtacacgatgtgaaattaggcgacttagcggaggagagtaatgttgctcctgcaacaagtgatggccaggctaatgctgcctcaggttctagtagcaaagctggtacagtcaggggatcagactctactgattttaggagtggctataactcaagctcaagaggtgcaatgtcatttgctgctgctgctatggctggacttggatctgccaatagcagaggtatcaggggtggaagagatcgactagggcgtccattgtttggtagttctaatgatcctccaaagttgatatttactgctggtgggaagcagcttaataggcatttgactatttatcaggcaattcaaaggcagcttgtgctagatgatgatgaaagatttgctggcagtagtgactatgtatccagtgacggaagcaggttgtggggtgatatttatactataacttatcatagggctgagaaccagacagataggactccccctggaggttcaacctctaatgcttcaaaatcttgcaaatctgggtctgtatcgaattctagttccgaagccaagctgcatcagacatctgtactagatagtatcttgcagggagaattgccctgtgaactggagaaatctaatcctacatacaatatattggcattattgcgggtgcttgagggtttgaaccaacttgcatctcgtttgagggcccaagtggttactgatagctttgctgagggaaaaattttggatttagatgagctaagtgttaccagcggtgctagggttcctacagaggaatttataagcagcaaacttactccaaaattagctaggcaaatacaagatgcccttgccttatgcagtgggagtcttccctcgtggtgttaccagttatctaaagcgtgcccttttttgtttccttttgagacccggcgacagtatttttattcaactgcctttgggttatctcgtgcattgtatcgccttcagcagcagcagggtgctgatggtcatggatcaacaaatgaaagagaggtcagggttgggagattgcagcgtcaaaaggttcgtgtctctcgaaatcgcattttggattctgctgctaaagtgatggagttgtattctagtcaaaaggctgtacttgaagtagaatattttggtgaagttggcaccggtctgggtcccactctggagttctacacacttctcagtcatgacttacaaaaaattatacttgaaatgtggagatcaggttcttcagagaaatatcaaatgaaaattgatggagatgaaaagaaaatgaaacgtagtgaaggctcttttgttggagatggagaacttgttcaagctcctcttgggctgtttcctcgaccttggcctgcaaatgctgatgcatcagagggtacccaattttttaaagtgattgaatatttccgactattaggccgtgtaatggctaaggctcttcaagatggacgcctattggatttaccaatgtcagtggcattttataagcttgttcttggtcaagtaagttatgaaatgttgatgtcttatctgatttgatgtgcatcttaaggttgatttttagtatgtatatatttaacccttgatatattgcaggagcttgatttgcatgacattcttttcattgatgctgagcttgggaaaactttgcaagagttaaatgcccttgtttgccgaaaacattatatacaatctactggtggtagctacaccgatacctttgctaatttgcattttcgtggggccccaatagaagatctctgcttggacttcacacttcctggttatccagagtacatcttgaaacctggagatgaaattgtatgtattcagtctgtttctattacctggtttttgttttggttctgattctgtctgttatgaaaattgctttgaacttactgtcaaacttccaggttgacatcaataatctagaggagtacatatccatggtggttgaggcaactgttaagactggaatcatgcgtcaaatggaagcatttagagcagggttcaatcaggttatatgctgtctcaattaattcatgtaacttttgtctttgactgtgcaccttgtttggtgatgctgtgtaagctcttatctaaaatgtcatgtattttttaactgtgatcagaaagttctgtaatatcattgttgtctgtcttttacttgcacattgtcaattcttatttaaaacatcatgtattttttaattgtgatcagaaagttctgtaatatcattgtctgtcttttacttgcacattgtccattctttttggtgttccttctctcaaacaattttattgaaaagtaaacttgactggggtttaatttgataatattgagcatggattcttcagcttttagattcttaaggggcattgttttttctaataaaaattattacttttggttatatcttgagcagtgaactgcatatatagcctgaatatcggatgtattaattaagaaattacaaaatgtttgtttttgacttttacttatgtttgctaccaaccttgtgtcccccttcccctggcccctgcacatcaagaatggaagatagaaaatacacatttttttttatattgatgtcaaatattcagttatttaatgtcaaaattttacaagtgaaataagctactggctgaggaagagatgggctgggctgggcaatagttggaacttggaaaaactagtttgatgatttgttcatttgcttgagtccaaaaactaaacatttgtcacttgcccacttgttcttttcaattcaggtttttgacatctcatctttacaaattttttctccccaagaactggattacttgctttgtggccggagagaattgtggaaggtattcttttttgtgcaaaagtattactgctgcttacaacaatattttaaatgttaccatgaataatgtagttataaatttatttttctcttttctgcagactgagacactagccgatcatataaaatttgaccatggttatactgccaagagccctgccatagttaatgtatggttcttttccccatagaaggacatttgtgtttttggaaatttaggcttgctatatttgatgctgaacctctatgatgctattttcagttactcggaattatgggagaattcacaccagagcaacagcgtgccttctgtcaatttgttactggtgcacctaggttgcctcctggtggactggcagttctaaatccaaaattaacgattgtgaggaaggtattgaaaaaatatttttgatcacttgcaacctgtgctatttattcatgcggccttcacgcaattttgtacttgaatgttaaagtggctttcctctacttttcctttttacctcttaaaagggggcttacaaaatgcaagtttgtaagtgattacatttacatgtctgggtgcagctttcatcaagtgcagctaatgcttcatctaatgggaacggtccttcagaattagcggatgatgacttgccaagtgtgatgacgtgtgcaaattaccttaagcttcctccttattctaccaaggtagaacactgcaaagcattgttggtaatatgatcatgcatgtcaaagtgtcttttggtgttgaactgttgatatttgatttccattttaaaacaggaaattatgtacaagaagctactctatgcaatcagtgaaggccagggatcctttgatttatcgtgagtttctggaactaaccaacccggccctgtatgttaatatgatgatgaatcagggtttactcttgagacttgattattttttggttatatgtactttcctccctgcttctcaaataatggcctctcccgggtcacacatcaaaggtggtgacatggttcaggtgagtttaccattgttgtgaaacctcactatgattcttgacactactagaccattgttgtgagcttaccaagagcctcttattattttgttcattttcatttgttggtaaactaattaatatcatttctttgattactggcagttgaatcggatcgcctcgttctaaaggtgtaaaggaatttgcggagctcgttttagctgttacaacatgtaaatagaataggaatgttgagtaattccctccccctctaaattttccatcattctgttttcaactcaaattattggcagttagttattatacatgcatggaagatggtaaaaggaatagaaataatatcaaatactatgctttattatttcatgttagatctgttacgagcttttgttgaggtaaaatgtggatatcactctatgctgatgctatttgctatgattgccccaaaatgaggcgctctatagcataaataagtgctgtttgggttgccgattggttagtcgctaatgtacttttgctaaagcatctcttttgttacttctccgttgaaatgcattgaaattcccgcaaccaaggtttgaatgggaattcaaacattccctaaatttcatgtactagctagggctatctaaactgtgatagcgccaattctaatgcactttaaattttcccc

SEQ ID NO: 122 - DNA, 16846 bp, Artificial sequence
  Synthetic polynucleotide
catggtacaccttgttctggagaaatgcaacaattacctttttattttctgtttacacattaccctgtcttgaatgctacagagtttctactgattagttcagtttatgactatatggtcttacttattctctgatacatttggcaaaggtaaaacttcagggccaacataggccatgctctcccctgatcattttagcaactctgcagaatatctgacagtattttgagctatattgctaatgaaacatgtaaatatgcttttggaaacactgaatttatcttcaaatcacaaccctctttgcctcctaacatcggctgcaagctctgccactggtttttgatagaacatttttctgctttctattgttgtttggatctctagaaataatatcttcacgtttgaaatactatgcatacagataatagacgcatacgtgtaccatctctttgtatttgtatgcatgctcttgatggtggcctaacatatatgctacgtttttttatttagtcattgcaagctcttaaaaaaatatccctggagcatccaactgcgtgcttgcgagctggtgcactaatggcagtcctatcataccttgactttttctccacaggtgttcaggtaatcactctctgcctattatagacttttgcatcacaaaatactttgtttgtttcagctcatttatctcatagcttattcttatgcattacttgtcattatattgtgacagatgaactgtattatttattcttgttatttatttttattactaactgttgtttttgttgatggaatgttttcagagagttgcattatctacagctgctaatatgtgtaggaaacttccttctgatgcatcagattttgtaatggaagcggttccacttcttactaatctactgaactatcatgattcaaaagtacaattgccattccaaatgctgatatcctctatgataccatttatgtttcagatgctgatattccgttttgcttattccaggtactggagcatgcttctgtctgccttacccgtattgcggaatctttttcaccatttccagaaaaattggatgagttgtgcagtcatggattggttgcacaagctgctagcttagtgtctgttagcaactcagcaggacaggcatccttgagtacatcaacatatacagtacgctccattttggctttttgggtacaattatttgttttacgtttgtgaagtttatgccatgtttttatagggtgtgattcgtcttctctcaatatgcgcaagtggatcacctctggcagctaaaacacttctccttcttggaattagtggcatacttaaagatatcctttcaggctctgggttggttgctggcacgactgtgtcccctgctttaacaagaccagctgatcaggtgattttgtcttttcataggcacttcaaggctctttgggtatcatgtgtgcttgatgtctacatttgttgtttatcttaacaagctaaggccccgtttggcactgctccacttcacaaaaacaagcgcaacttcatgaacttcaaaatatagcagcccagctttgaagttgcagagtttttgaagagtttggcttgtagaccagctttagtttcataaaaaaatataattaaaaaaaacttgtttcttcttcctttggccgtggcggccagaggcgcacgtgcgcgacttgggaagacagacacaacgctgcgatggcctggcgtggctctggcggcccagcgcgctgcacgcagcctggcggcacgttgtcggccgatgcggccctgctcgctagcgcaggcggtggcacgcgcgctgccagagtttggttcaggcgtggctctggcagcggcacatggcctggcggtgcggctgccggtcggcacggccctgctcgctggcgtaactgtgtgcggcctgagttcccttgagaacagaacgaaagaaaacatttcgtgagggattgcgtaactgatggcaaaggtgggtaatttcaccccaacttaatgagggagttaaaaatacccattcgtgaagtatacttttggttgtttcatggatttggtgaagttagggtcaacttcaccttttttggtgaagctgggagtgtttggctagagttttataaagctaagctagattttgtgaagtgaagcagtcccaaacattccctaagtgtaaattaatggagctaggcttactctatgcttcagatagtacttcaaccattgattccaatttccaagcctcaggatatcatctctattaaggccccctttggcacggctctggctctagcttcttgcagccccttggaaggagccctgccaaacagccatctaaaacacagctcctggcaaggagccagggccagaaaaatggtttctcccagctccttacaaacttgatacaaattattacaaaactgccactggacctgttttgaccaaaccttttccaaaacggcttcaactggcccaaattataaagccagcacaattaatcccatacacttcccaaccttacaagccccttaatacagcccatctcttccttcattctccatacatatctgaaagtcttccatgttctctctcttctaccacttcgtggcgcagtgaggggggcttacttctaggagcgcctaacatgtgctatataacatctttacgcacaatgacataggaacaagtgtcgtcaaagaaaacaaataatatttgtgtatattaaaacattttttgatgaatttgatgaaatgaaaccaaatcgtcccataacatgtttttctcataatgcattttgttttttaatcgccaccaataatatactttgagcttgtagtcaatgttcgtttatggtatgacattgtttttctttaatgtgagcatactcatactacttcccatgtcgagcatttgtgaacatgatgttatcctatgttctattcatgatagcacaatttatatttgtgatgaattgtcatctatgttaaattttaatgggtactgtaacttgtaaagctactgactttttggtagtaatagattatcaccacacaattccatatgcaaatgatgccattatgtgttttttggtattacacagatgaatgagattgtgaagcttgcagatgagttacttccttctctgcctgttgggaccatttctttaccagtgtattctggtgttcacatgaaaggttgttctgtaaagaaatccacttctagtaagcagggtgaacatggttcaacagcaaatgaactatcaggtcgggagaagttattgcgtgatcagcctgaacttctgcagcaatttggcatggacctgttacctaccatgacacaggtcagtcttgtcttattaatgttctctttgatgttgttaatggtaatgctgatgtggtattacgggacattgttgctatcatgttggtgtgatacttaaggacttcaataccttgaacaggtgtatggctctagtgtaagtggaccaatacggcacaggtgcttatctgtcattgggaaattaatgtactatagctcagctgagatgatccagtctctccttagcacaacaaacatttccaggtgcttaacacaatatatttcatcgagttatctcatgttattagaaactatcttatcacatgaattccaaatatttgtttcaagctattaacttctatatcaaccattgcagttttttggctggcattttagcttggaaagatccacaagtgttgatccctgctcttcagatagcagaagttttaatggaaaagcttccagagatttttttgaagatgtttgtgagggaaggcgttgttcatgctgttgagtcacttatatgcccagaattatctggtcaggtgactcctcatgtggattccattacatcttcacataataggcgcaaccgccgtagaaataatgctgtgaacactggaaataacttgcctgatggaccaaaaggttccaattctatgattgccaattcacccccaagcatggctgaagttccaaataatagtcttcgtgctttagttagtaatcatgcaaagtcatttaaggataaatatttcccttccgagcctggctcaagtgacattgcagttaccgatgaccttcttaaactgagggcactttgtgcaaaactgaatacaacagctgacactatcaaaacaaaagctaaaggaaaatcaaaggtagtgtctgacaatagttttgatgtcttgtgcaatattgaggagcaattggatgatataatagctgaaatgttgtctgagcttagcaagggtgatggtgtttcgacatttgagttcatcggaagtggagttgttacggctttgctaacctatctgtcatgtggaacatttgggagggaaaaggtgtctgaggcaaacataccaaatttgcgtcatcaggcagtcagacgatacaaagcatttatatcttttgcacttccaaatgataaagatgggaataaaactcctatggcattcctagtccataaactgcaaagtgccctatcttcgttggaacgtttcccagttgtgctcagccattctggaagggcatcgactttgggaggatcccgcctgacaacaggtttaggatctctgtcgcagcccatcaaattgcgtctttgtcgagcgcctggtgagaagtcacttaaggatttttcgtccaatgttgttcttattgactcattagctagtctggcagctgttgaagattttctttggcctagagtccagcgcactgaaccagtattgaagcctccaatgtcatctgcaaataattctggatctggagcagcaagctccacagcttgtgcgccttcaattccatcagaaactcaatctgtccgtcgcacatcgttaagatcaaagtcatcagctgccaccagtggtgcaattaagaaggattatcaggagggaagcataaacacctcaaagggaaaaggaaaagctgttcttaaattgagtttggatgaacctaaaggcccacatactaggaatgctgcgcgcagaaaagctacttcagagaaagatgttgaactgaagccatcacatggtcacatcacttcagaggttagatactcgtgcattcaatcttatttgttatttgcataatatatgcgaaatggcctctagcctagtggttaaaggcttccgaatagcacctccaagtctcgggttcgattcccctcaggggcgaattttccggcttcctgtgcgccaccctccggttggaccgctgtagaggggacggttgacgtcagctcgttagtgatggggaggggggggggcagagtttggggattttcttggccgagaccattgttttagtctatcttgatataataccgggatggcggtcattccttccctggctgagttttttttatttgcataatatatcaattgagccctcctaagtgagctccgttgggaagtttagctttaatttctggctctaggacacattgattgcaaatgtttttttaacaatgccttttgtttactcagctgacaaatgttatcatagtaatgatacaacagtaatgcagctgatttattttgccttaagtgtatctagtttgatcagtactttgttttagtatgtaagcaaaggatttcaaagggatgttcttcatagacatgatgtacagattgtataactataaaaggagggggggcagtgctgcaggctccgacatgaggagtctggggaagggataaaccgaggcaacccttctcccgtaaatacggagagacactgctttgaacccacaacctggtgactccgggagacaattcacaccactgacgtacagattgtataactataagtctataatatcataaatgtataacaatgaaaatgcactgaactgtggcatttctgtgtatcatgcatttataatattatatctgagataggatataaaaactgaagcattttttataagagcaacaaagattaaagtagaaatatgcctgtttcactaatattttataatttagtcatattatgtaatgacctgactacgctttcgtaacttagtatactggactatattgtggatactcacaaatatgaaatatcagtgtaatcttttactctaattctctaaataaaagatattgttgtattttgattttaaatatctaagtgaagttttcaggggaaacaactttatgaattattatttggaatagtacgtgcatgttcttttataagtttgatatctgaattttagaaattaaaaagtttgaaagccctgcaacatatatttatattattatacctgcaggatgaagatcttgatgcttctcctgttgagattgatgatgctttaattcttgatgatgatgacgaggatgtcccagatgatgaagatgatgatcatgaggcggtaattattttttaaatcttgcttattactacaaaggtttgtattgaggggacatgatttggaactcagtagattttgttgaaatgatcaggttctccgaggttctcttccttcctgtgttcctgagagagtgcatgatgtgaaattaggagatgctgatgattctagtgttgcctcattggcaaatgataaccaggcacagccctcatctggttctagtacaaaaaatacttctagcaggggattggacactgctgaatttagaagtccagccacatttggttcacgaggtgcaatgtcgtttgctgcagctgcaatggctggattaactccagtaggtggtcgtggaattagaggtagccgagatcggaatggccttccattgggtgctcgtgcaactgagcattacaacaaattgatatttacagctgctgggaagcagctgaacaaacatttgactgtatatcaagctgttcaaagacaagtagttcatgccgaggatgatgaagatcggttcggtggatctgatttacctgatgatggtaaccacttctgggatgatataaggggtgatgtgttcactataacgtatcagaaggctgataacacagcggagaaggggtctgttggaggttcagcttcagtgccaaaatcttccaaatcagattcttgcagaactttgtctgaaaaacagcgtacttctcttcttgatagtattttgcaaggagagcttccctgtgatttagagaaatcaaaccaaacctacaatatcttatcactattacatgtgttggagggtttgaatcagttatcacctcgtctgagactgcagtcagcctgtgatgattttgctgaaggaaaagttgctacattaaatgggctatacgatgttggagctaaggtaccctcaaaggagtttatcaacagtaagatgaccccaaaacttgctcggcaaattcaggatgttcttgcactgtgtagtggcagtttaccatcttggtgttatcagctgacgaaagcttgtccttttctgtttcctttcgaaacacgaaggcaatacttctattccacagcttttgggttgtctcgtgcacttcatcgtcttcagcaacaaccgggcaatgataataacactgcttttgaaagagaagtcaggattggtagattgcaacgccagaaagtccgtgtttctcgtaaccgtatcttggattctgcagctaaagttatggagatgttctctaatcaaaaggctgtcctagaagttgaatactttggtgaagttggaactggtcttggtccaactttggagttttatactctcttaagccgtgagctgcaaagggttgacttaggattgtggagatctcattcttcagataattctgggatgcaaattgatgcgaatactgatgatttaataagaagtaaaaatcatgaatcagaatcacttactgagagcaggaacatagtacaatcacctcttggattatttcctcagccttggccacctactgctgctgcatcagaaggtagcaaattcttcaaagttgtcgagtatttccgcttagttggtcgagtgatggcaaaagcattgcaagatggaaggcttctcgatttgcctttgtcgacagcattttacaaacttttgcttggacaagtaagcatgagggcctccttgagctagttttatcttatgttgtcttctaaaaccttcctcttttcggttggcacttaactttctgtgccttttccttattaatttaccaaatttgctttaataggaacttgatttatatgatatattatcttttgataccgagttcggaaagacattgcaagaactgcaaattctcgttgcacgtaaacaatttttggactcctgctctagtgagagccaaaagatagatctatgtttccgtggtgctcccgttgaagatttatatttggacttcactcttccgggctatcctgaatatgttctcaaggaaggtggagagaatgcagaggtaagttatatgataccttagtttgtttttttcttctagtgttgctgcagatgactcattgttatcctgtcttataggtcaacatttgtaacttagaagagtatatttctttggttgtggatgctactgttaagaccggcataatgcggcaagtagaggcatttaaggcaggattcaatcaggtcttctttcttattttgtgatttgtgggcaatttctattaataattgatcctagaactaactagcacatttatttatttattcagaaaaaaatactcattgtatatttctcacttcaggtgtttgacatatcatcactgcaaatattttctcctcaagaacttgattatctgatttgtggtcgctgtgaactttgggaggtattgcttttgtggtcattcttgatgttgtacttcctctgtcccagaatgataagcatagtttgtataggaaaaagtcaaatttagaattttatttcccagaaattgcttgtattatactagtttatgtggctttgtgtcccgctgccataggtcaatgttagctattgaaagctagttgctctagtctactgcttccctttttttttcgggcggggggggggggggggggggtattctccctcctttgcagttcaccttttttctctcttaatgaaatgatacacaattctcttttgtgttcgagaattctttttacaaactttggccaacaattaatcaaattatatacatgttttggacaaacttgcatcaatagattcatattcagagtgcatttgagatgtgattaattgtttagcaaacataaacatattgtacgagaaattaatggtcaatttttttaatagattatatgagttattgtactcagtctaagtgttatggaccctggtcccgcccatgtaactccttttccaatatatgcaacgtagcccaccctgattggagttaacatggtagcaagcttggtcttttctctccctcccttccctagccgccacctcctggctgccatcactaccgtcgggtcgctattgtcgtctgcgcctccatctcctccctagcgcctttcttgctcatcggccacccatatttattaaggcagtgttaataaccatggggccaccaccttcactttagctttctaggcgcgactggtggccttgttggccctacggttggcgccttgcccaccggtgctttagtcccggtcacctcgattgctgccctagtcgctcccgtcgcccttgcctttgctgtggccatctatggcatgggtgccgccagccagggcccagacctagctgactctggcctagcttatctttcggtcgcgttacttccccctgatgtcgctttcgctcactccaccttggccatagcccccattgctgccaagacggtgtttgctgctgctcgggatcgggaacatgttgctgcccttgcttaggggcacaaacgcaccacgacggatgcactcgctcgatagcagaccaatgctgagggtcacctgctcggctcctcctgcatcgagaccctcccagcgctctagtggtcgcccctttgtcggagtacgaggtcgagatcatcaccaacctctatgccgaggtggcgtgtgtccagaacatttgctctatgattcccgtcatccttgacacaacttcctccaactacgccttctggcgggcgatcttgtcttcactctccatcgctacgccttggactaccacgtcctcaccaacactgtctccctcactaacctatcctggcggcagatggatagtgtggtcctctcgtggatccccaggaccgccatcgttgcgctgcatgacgtggtttgcgagcgtggtggcactatccgtcttggacgtcgtcgagtagttccttggcaatcgtgaggcttgcactctctaccttgatgtcgcctttcagacttttgtctaggggaacctctttgtcactgagtacttttgtcagaggaagggcatgcaagcctccctctatgaccttggggagcccgtctcccatagcatgctcatcctcaacctcctgcatggccttcacctccacacttcgatcacttcctcagttccgttccacaaggtcaaggtcaacaacgacctcatttccgaggagctcaccaaggggctgctaccaccctctacaactccaccactggggggccagcgcatgcaccctcttctactactatcttgggaggatcgtcgttgcgctcgtctgttcatcaaatctcaagcattgcacatcctccccacttgccttggtctgaggggaggggtctagggtggcggtcgacgaaaaggcggtcgtggtggtggccatggggacactccttggccttccatctacaacctgtggactgatcgcatctccatgtggcctggtccttctccgagagtcccttctcagcgtatcactccaccgtagccagctcacttgacattgctcggtctggggtatcaccttggccatcctacgccattagcacctgagtcaccacttctgtcactgccaccccacttcgctttgtcctggaacccgtggccaggtgggtgggatcaacagtctcttgctagctccttcaacacgatgaccttgactcctcccactgtcacctactaggtggctgattcctggtgcctcctatcacaccactttggacgcgagtatgctatattcttatccacctcttcgtctactcctaccattgtgggtaacgagaacattctctcggtcacctctgtcagtgattcggttcttcctaggccctttcaccttcacaatgttcttgttgccccacatatcctttaatattttatccgttcacctattgagcatcggtaattcttgttccatagattttgatccttttggcttgtctgtgaaggatcttgctacctagagtcttcttgcttgttttgatagatctaggcccctgtacacccatgcaagcctgcgtctacctccccacatactggtttcgctacatcatcacattcgtcctcgctacagtcgcctactttgactacttccactatttgtagtacttggcatcgtcgacttgtccatcccaaccttgtagcgtagtccaagctatgtagtactttagtaatttcttgtagtaggggcacccttgagcatctatgccagttgtgtaagttaggtcgtcattttcgacttcctttctctagcttctcacaacatacgctgtgatttgtggacctctccagctctcctgttaccaatgttttgggatataaatattatttggtgattcttgatgattgctctcattgtttgtggatttttccattgagtttaaagtctgacacctttacgactctgctcggttacttcgcttgggtttacacttagtttggttgcactatgaagatcgtccagtgtgacaatggtcgtgagtttgataacttctctcgatcctttacctcacttggagtctaccttcgaatgtcttgcccctacacttcccatcagagtggtaaggctgagtgtatgatttgcaccacgaataatgtaatgtgttccttgatatttcaatcatctgtttccgctcgctagtgggatgggagcctccacactgctacctacctccttaattgtcttcctactacgacaactcttatgtcatgccccccaccccactttgctcgaatggcaaggcttagcgcatgaattaatgtcatgtttttcttgctattttactattttaggcatccgttccttctccttactggtctgagagcctccacaccaccacctacctctttaattgttttcctattacagcgactcgtgcccccacttcccactttgctctttttgtcaacactccaatgaccatcttcgtgttttgggtatgtgtgccaccctaacctttccaccactactctccatcttgttcttcgttctgctcgctgtgtctttctcgggtactcatctgatcacaaagggtactggtgtcttgacctcaccactcatcgccatttgatctctcatcacgtcatattcgttgggatggatgtccccttctcaactaacacctagcccaccaccgcctcccctttcgagttgtattttcttcatgatcctgactccgtggtgccctttgtccaaccactgtttttctagttgctgttttcctctccactgtttcagccggtggcccctgtgtgcccatggtggatcatacacccttgaattcctttcgggttgcaccgttgcccctcgtcgacctgtgtgtcacctcgtcaacccatgttgggtccctaggccccggtggccccacttttgacattgccttcgttgctagggccctctttattgccctcgcctgtgccctcgccttgttgctatgcccaacctgtgcatttctatcagcgacatgcccgagtgggtacaccgcctcgctcttgcgacgagccgacaatgtatcaccccttcatcgtgactctcaccacatccacttgatggcgaattgccaggccactggggtccttagccctgttgattgcctcatcctctccgtgacctcctcattgtcggtttctcatgtgtcgtcttgcgttgattgcaccctttctaatactcattggcgccacgctatgaagaaagagtatctgactatccttgccaatcacacctgggttctggtattctggtgccccatctttcgtgcgacaatgtggtgattgacaagtgggtctggacacataagtggcaggcggctggctcgctgggctactcagtgtcgtgctgttgactacgatgagacgttaattctcgttgtgaagcctgctaccgaccgtgccatcctcactttggccctctcccattttcggccaattcatcacttggatgtcaaaaatgcttttctgcatgggactctcacttagacttgtctactgctgtcagcctactagctgtgttgatcatgcacaccccggtatggtatgcaagctcaacaaagtatgcaaactcaacaagtccctctatggttcgaggcaagccccacacgtttggtacaaccgcttcaccatatatctgctctctttgttttgttgaggccaagttagacacatttctgttcatctatcggtgtggtagtgacactgtatacctactcctatatgttgatgacatcgtgctcactacctcctttctcatgcactagatcaccaccgctcttcagcatgagttcaccatgaaggatttaggcccccttcaccactttatggggattgctgttgagcatcgctttgatggcctcttttttcagcagcgacgatacaccctggacatcctcgagcgtgctggcattctggattgcaagccttgtgtggcgtcagtggacatgtaggccaagctctctggcgtcagtgctccagtcagtggccccatcacctaccatagcctcatcggtgctcttcaccatctcaccttcaccagacctgacatcgtgtatgccatccaacaagtatgtctttatatgcatgatccctgtgacctgtacttgggtgtggtcaagtggatccttattgttgactatggtctcctcctttggcgctccttcatccatgagctaatcatctatactgacgccgatgggccgagtgtcctggacacctgtcggtatacctcggcgaacctcatctcctggtcctccaagcggtagccagtggtctcccgttccagtgctgacgttgagtactggctgttgctaatggggtggctgaggcgagcaagctgcaccaacttctccagtagcttcacaacccactcaccatgagtaccctggtctactacgacaacgtcagcatcgtctacctctctgtcaacccttttcaacaccaccgtattgaccgttttactattggggacgtccgcgtatgtttcaacgagctcgtagtttgatgacaccttcactaagggttttcccttgttcttggagtttcggttgttggggcgggagacagaaccggtcctcaactaccaattgtactcaccactcaccaagattcctaatgcagagtaaccgactaggaggtgcgaaggcctatggcggaaggggcaagccgcggaggccgaccccaacttcggtccttcctaacaatcgcgaaggctacttgactacgcagggaccttggccaaacctcgacgagggacaaacacgttcagcgagggcaggcgggggctaggacgcgtcgaagacccccgaagcaccgaacgaagacccaactgctaccagccgatgttgaccgaggcgagatcactcctctttggtaggccgtcgtgaggcagtttttctctaaggcccccacgcagaggccataagacgaggaatgttggattccgccaagcggcggctcagttgtgggcgtagactcgcctactccacacgtcagcctttgatgtgggtgagaaagatggtgtaatatggaatgtagccaggggacctgtaattaccccgttgcacacctgttgcacggtatatttgtggcatgtagtaggtaaccaagggcattacgatattttaggccttgggcccttggccgccctatagatagccccatcctgtagctggatgggacacacttgacaagacatttgtgctcccagccaattgttttgtcgtgccacctgtaacaccgctctcgagtgcttgggcacactgttctaagtcccaacatcggtccagtctcaacatcttccactactagagtttcatctgcgggggtgggggtaggggtgttagattcttgtgcgttattgtactcaatttaagtgttatgggccttggcccagcccatgtaacccatgcaacacagtttaccctaatttgggttaggtttccaacaattttgtttgacttttccattatcaaaacacacttaggccttgttcgtttacgtcggattgcacccggaaacgttccagctaatcaaagtttatataaattagagaagcaatccggctaggaatcgttccgacccaccaatccgacacaaacgaacaagaccttaatatttcacgatgaatactcaatttaagtgttatgggccttggcccagcccatgtaacccatgcaacacagttcaccctaatttgggttaggtttccaacaattttgtttgacttttccattatcaaaacacacttaataagttaatatttcacgatgaatgtagttgttttggcttattctgaacaatttcacatcatgcagccggaaacactgcctgaacatataaaattcgaccatggttatacctctaagagtcctgcaattgttaatgtaagtttccctgcttctttgtaattcatttgtaggtttcgtaagtttatttggatgtttctaatgttgtgttttgcagtttcttgagatcatggcagaatttactcctgagcagcaacatgctttctgccagtttgtgactggtgctcctcggcttccacctgggggtttggctgctctaaatcctaagttgaccattgttaggaaggtaaattggctatctttgttcttatttgtactttatggttgacatgcctgcccacattgttgaagttttgaattcttcttaaattccagcactcttctgtggcaaataatagttcaaatgcaactggagcgacagagtctgcagatgatgatttgcctagtgtcatgaccaactatcttaaactaccaccatactccaccaaggtatgcttctttctgctttttggctaactgtggttatatctcctgtattgtcttataaattgaggattcagaaacccagtcaccaaagaattacttcatatagccttatcgtaacaggtaactggacaaattttcaactaaggacgtggaaactaaaatttaatgtgggcagcaccttccagccactcattagttagaattattatttcgttagtttaaatcaaatagcatattccacattgcttgaaccctttatattgacgcatgctggttttttttctggaaggaaatatttacagtgctactcgtgctagtgtgtggcttgttatctgtgtctgaattttgttgaaaacttcttgcaggctatcatgctaaagaaactgctttatgcgatcaacgaaggccaagggtcatttgatctttcgtgaatctcaacactaacataggtattggtccacctagaaatctgcgtcattgttacccagagttagtttctacctcattcatgtatgacataggttaaactcagctctccggagtcccaccgaaggtttggagcccgtacctttgggtgtggatgtctatactctcttttcttggttgtatattcttgcggatctttatagtgaataatagtaataaattgttttgcgcttcttac

SEQ ID NO: 123 - DNA, 10181 bp, Artificial sequence
  Synthetic polynucleotide
aggcctggagttgccgaccacgagagatcctgaccagcagttgctgggctgtgtgtgtgtctgcgtctgtcactctcctctctcgcgtcttggtcctcctcctccccttcatcgaacgaatccatccaaggcaaaagggaacgagggaagcaagcaaaaaatccccaattcctcctagatcgatccaccgccgacgggacgaatccaatccaggagctatcggctggaattggattcacgcgcacccgcccgctgccgctggccgccgcctagtctcggccggccggccgaccggccgccctccccgcgcgcgcgccttgccttgtatggaaacacgcagcagcagtcgcaagcgcgcagcggccgccgcctcctcgtccgcctccaagcgcccccgccgcaactcctcttcctcctcctctgcgccgccgcgccagcagccaccgatggaaccctcgccctcctcccgccgccgctcccgcgccgccgccgccgacaagggcaaggaccccgaccccgcctcctccgaccacccttccccacccgcccctgacgatgacgccgacgtcaccttcccccagcccttcacctccgccagcaccgccctccagggcctcctccgcaggctcggcgccggcctcgacgacctcctcccatcctcctcctcagcgccctcctccgccacgtccggtcacctcaagaggatcctcgccggcctgcaggcgcacggcgacgagtcgcgccagctccagtccctcatgcagctctgcgagatgctctccatcggcaccgaggactcgctcgccgccttcccggtcgatgcttttgtcccaatcctcgtcgggatgctcggccgcgaggacgagcctgccaccgctggtgccagccccgacgtcatgctgctcgcggcgcgggcactctccaacctcgttgatgtgctcccctcctcctgctccgcggtcgtgcactacggggccatacagtgcttctgtgctcgactgctcaccatcgagtacatggacctcgctgagcaggtggtgccttccctttgtcttcttcttcctcgttttatcctgtatcatcgctcatcctcactatcatctaaaaatgaaatatgatcagtcatcctctgcatgcatgcccttagccccttaccaaggtgctgctaacacatttactttactcgcctgctcagtctctacaagcccttaagaagatctctctggagcacccaactgcctgtttgcgagctggtgccctaatggctgttctatcgtatctcgacttcttctccactggggttcaggtcgggtcctctgatctccttacaaccgttcttatcttgtgcactgtttgcatctacttacacctcttcccatgggggacgtacttgttgtagagggtagccttgtctaccgctgcaaatatttgcaggaagctgccgtccgatgcttccgagtttgtcatggaagctgtccccttgctcacgaatcttctaaatcaccatgattccaaggtactttgcaagctcagacaaccatacctctggattatgatatattgaggtatatcatgtatttcccaacccttcatctatgtgccttacaggtactagagcatgcttctgtttgtttgacacgcattgctgaagcttttgcctattaccccgacaaacttgatgaactctgcaatcatggattagttgctcaagctgctagcttgatagctgttggcaactcatctggccagacatcactgagcacatccacatatacagtatgggccattttattttgatacccttttattgtttgctgtggcccctctttctcacacttatgctaaaattaggttgcacgcttttcagggcttaatccgtcttctctcaatatgtgcaagtggatccctgctggcagttaaaacactacttcttcttgggatcagcggcactcttaaagatatcctttctggctctgctttgatttctggaacatcagtctcccctgctgtaacaaggcctgcagatcaggtgaatatttctatcactgacttaggacttgactattctgctagtgctggccttttaaaaaaaaatcaatttagccacaatttctctctgtgattggattcaataaaattccgatttatcagtgaaaaattaggctttggcatctcacactttctgaaattacatctaccacacgtatcatgcagacttttagaactctaaaggcgacatcacatgttcataattatatgtaccattgagcaattgtttgggtgatttttttgagcattgaacatagatgctaaaatgtcgggaattgtgctcgtcttcttaaaccatgcaaataatcattcaaaagagcagtgaactagtattttcaaaggcctgcatactttcgttgtgcttttatattgcctgagtaagtcttttgaaatgttttaatgaagcagaaaatgttgatttatggcacacaggggaacaaaagtctcacttgtaatatgatagagcaaaatctcatttggattaagtagctgctgtgattcttgtcgtcttattttcttcctagtgtggtgcaagtaaattgtgcttttggtcaatcgcatttggtatggtacagatcgaagagttttttttccatgctatacaattgagtatgaatatataatgccatctcagcttctgcttgttgctgtcttgcttaattgctaaaatcatttgtggtacatacacacacgagtctggcattttttgagtatgatcgtctgcaacagctgctgtatcttctcacctagctgctgaaacattaattcttgaaacccacactgtttgactcatcagtttcatgcacctgtatgttttttgttgtacaaatgtttttcatatgtttaccccaaatattgcagatgtttgagattgtgagccttgccgatgatttgcttccgcatatccctgcgagaatcattaagttaccaacatattaccatacatataaaggctcttcaacaaagaaatctgcttccatcaaacaagaggggggtggttcaacaggaaatgaaaggtctggccgtgagaggctattgcgtgagcaacctgagcttttacaacagtttggtatggatttgttacccacaatgacacaggttagtgctggaattcttttcctgagtcctgacagccatttcaattgctatttgtgttttgtctttgtgtactttaatagcctgtgtgcttgttcaggtgtatggttctagtgtaaatgcaccaatacgtcacaagtgtttatctatcattggaaaattaatgtactacagctccgccgaaacaatccagtctctccttggcacaacaaacatatccaggttttctctctctctcacctggaacacacaaaagagatgcatgtttcattaatagaaccgaaaaaattctcagttcatttctagagaatgatttcagaacaatggatgttaaaagacaaaaagaaagtctctcaagtctcaatgtacatacttcttttccaatcccttctaagttatttcatttctatctgcagcttccttgcgggcattcttgcatggaaagatcctcaagtgttgattcctgctcttcagatagcagaaataatgatggaaaagcttccagagacattttccaagttatttgtgagggaaggtgtcgttcatgctgtggagtcactcatatgttcagaatcttccaacaaaatgccttctcaggtgccacctcaggataaagataaagattctgccatgccatcacgttctagacgtcaacgccggcgtgcgggtgctgttgcagcagaaaatagttcattggatgaatcaaatagttccaaccttggtgttatgtgctcaacagcaaccgcttcagaagctccaaacaccagccttcgtttcacagttagtgaccatgcaaagtctttcaaagataaatactttccggcggatactgattcaagtgatatcgggtttactgatgaccttcttaaactgagggcactctgtgcaaagttgaatactgtctctgagaacgtcaaaacaaaagcaaaagggaaatcaaaagctataagcactaattttttggacatctcaattgatgttgaagaacaattagacaaaataatatctgaaatgctctctgagcttagcaaagttaatggtgtttccacatttgaattcattagaagtggtgttgtcatagcattgcttgactatttgtcctgtgggacatttgggaaggaaaaggtatctgaaggaaacctatctcagcttcgtcagcaggcccttagacgatacaaaaccttcatatctgttgccctttctattgatcatggacgagatgaaactcccatggcactgttggttcagaaactgcaaagtgcattgtcttcgctggaacgtttccctgttgtgctcagccagtctagtaggattggtattggagggtctcgtctgacttcaggtcttagtgctctggctcaacccttcaagcttcgtctttcccgagctcaaggcgaaaaatcacttcgggattattcatcaaatattgtgcttatcgacccatttgctagtcttgcatctgttgaagaattcctttggcctagagttcaacgcagtgaggttgcatcgaagcctataattccatctggtaataattctgaatctggggttcctggcaccacggctggtgcatcattaacagctgcaatggctcaatctggtcggcgcccaacaacaagatcaaagtcatctgctgcaggtggtcttacatctaagaaggattctcatgatgaaagcactagtactgccaaaggaaaaggaaaagctattgtaaagccaaactcagatgaatcaaaaggacctaatacaaggaatgctgcccaccaaaaatctgcttcagagaaagatttggaaatgaagcaggcacatggccacagtagctctgaggtattttttttgtttacatgcctcattcctggttagtttggcttgcaaagaaaagttactgtttctattcaagttgggtagcagctcttctcaaaagtcgcattgtcagggcctaaggaggcccacggaggggctgcggcagcagcagccatgggccctccaagggggattagataatgatagttagagataagattagaagattagttgagattatttaggagattagttgagattatctaggaaggttatcagttagtttgttgagagtttttaggagagttttaaggagataaaggtctcaagctagacaagggcggccacccggtctatttatgtaatcaatggataagaaataaattaggcaagaattagaagggagaaaccctcctcttgctcggccgtgggcagaggccctcggccgacgttcctgcccgtcgatacccctctctaatccctcaccgatttagcgtccataacacacatccacttctctggtgtcatatttggtgccacctataaagctcatggcttgggcgccaaatgaacatgataattttagccgcggatctagttcttaatttatattaccctcataatatgtaaacatgattttgtgagttcaaaactgtgccaatctaaaaaatattaggataatgatcaagaagtaggctcattttctagttgagagtgtaagcatggtaactgataagtaaatacattctatgttggtatatgtaggatgaagagctcgacacatctcctgttgagatcgatgatgctttgatgattgatgatgatgacatttcagatgatgatgatgatgacgacgatgatcatgaggtaactgtttgaaaattgaatgcccactcttttttttgcttcgttgcaaccatccgtagttgcttaggttcatattcaaggtactaaatagcatgggttcatagcagtttgatgttgcggatgtcaggtgctattacggaccgctaagttccaatagcagtatataataatcaaacataaatttatgtatatatatatcattaatattaatttaatagacgtttaattaattatacttagataagtgatgtctcacatcattattatcaacaaagccttttagccccaagcaagttggggtaggctagagttgaaacccatcggaagccacaaattaaggttgaggcatgtggaaatcgatgtctcactctcacatactttaaattaaataaaggaacatgatattcaacatattacatataagtcatcacacattggactggagtctacaaagaaatatattttgatagccgtaaaatagtcataaaatcatgtttcattgtcatgtcagaagtagtaacctcaatagtttcatgatagttaaaatgggatagggttatttgttgtatatcatacaacactattgtggacactatgaagaagtgcggagcactataacagcctgctacctcaaatagcagccgctaagttccaacctcaaatagtggtagcggtaagagaccgctaccgttttttgcggacgccatagcggttgctactaacgctatttagtaccatgcttatatttatttactttatgacaaaaataaccttttagttggtccaagatgatcatttgtgcccttacttgactaatttaataacctctccaaattcttaggttctccaagaagggtctcttccaatctgttctcaagatggtgtgcatgacgtgaaactgggtgatgccgatgaatctaacattggatcagctacttttagccatgcacagccatcatctggttctggggctagaaacacttctagcaggggaccggattctactgaatttcgaagtatgggcacattcggttcacgaggtgcaatgtcatttgttgctgcgacgatggctggtctggcttctgttggtggtcgcagtgttagaggtgtccgagatcggcgtggtctgtcacttggaggtagcatgaatgatcacaataaacttatattcactgctggtggcaagcagcttaacaaacatttgactgtatatcaagctatccaacgtcaacttatgctcgacgaggatgatgaagaaaggtttaatggatctgatataccaaatgatggaaaccgcttctggggtgatgtgttcacaataacgtaccagaaggctgataaccaagttgagaagggttgccaagggacttccacctcattaaacataaaatcagattcttacaggtccatttctgaagcacaaggggtttctcttcttgatagcatcttacaaggagaacttccttgtgatcttgagaggacaaactcaacgtacaacattttagcattattgcgtatacttgaggggcttaatcagttatcccctcgtttaagagtacagggagcatctgatgattttgctgagggaaaaatcaataccctggatgagttatatagaactggagccaaggtaccttctgaagtgtttgtcaatagcaagttaacaccaaagcttgctcggcaaatgcaggacgttctcgcactatgtagtggcagtttaccttcttggtgttatcaaatgaccaaggcctgcccattcctgtttccttttgagacaaggaggcagtacttctattccacagcctttgggttgtcacgagcattgaatcgactccagcaacagcagagtgataatcacagctctggtggtgaaagagaggtcaggtttggcaggttacaacgccagaaagttcgtgtttcccgtaaccgtattctagattctgctgctaaagttatggagatgttctccagtcagagggctgttcttgaggtggaatactttggcgaagttggaactgggctggggcctactctagagttttatactctcttaagccatgaactacaatgtgctcaactgggattatggagagctacttcttcatatgattcaggattgcacactgatatgaaggatgtgatccgtttagatcctgaagatgggtcgtcaggaaaagaactcaacacagatctaccaggtgatggcatgtatttgatacaagctcctcttggattgttccctcgaccttggccacctaaagttgatacttcagaaggtagcagattcttcaaagttttggagtatttccgcttaataggtcaagtgatcgcaaaagtcctgcaagatggcagacttttagatttgcctttatcaacagcgttttataagcttatacttggacaggtatgtacagagaagctctatttccaagtgctttgctttcattttgttttgctttgttttatgtattaattagttgtttgtattcacttttcacgacttaatgtgttgcaattggccaggaacttgatttgtttgacatagtgtcatttgattctgagtttgggaagacattgcaagaactgcaagttcttgttgaacgaaagcagttccttgaatccacttctggcaagaaccagctacaagttgcagatttgtgtttccatggcgcttctattgaagatttgtgtttagattttactcttccaggttatcctgattatgtgcttaaagagggtgaaggaggcacaattgtaagtgatgaagttccatattagcgtgtatttatcttggtgatttcactttgtatgttttaatctgttagtatcatctgcaggttaatatttataatttagaagagtatattactttggtggtggatgctacagttaagtcagggataaagcgacaggttgaggcatttagatcagggtttaatcaggtacagcctcattggcattgctctaacacaatcttataataattctacttgttctgattttgtgtagttcagtttactctaatagttcttgtttattttaatgtttcgtaggtgtttgacatgtcatccctccacatattttcacctcaagaacttgactatctaatatgtggtcgacaagaaatttgggaggtaatgttctgtcctttttatccaagttaatgtatgtaaaagtgtggcactaaataaaccttggaatctgcagtcggaatccctggtggataacataaaatttgatcatggatatactgctaaaagtcctgcgatcgtgaatgtaagctcattcgtcctcacatgctacatctcttacatacatccagttgtggtttttgagaagtgtggttccttgattcttgctcttgtttgtagctactcgagattttgtcagaattcacccctgagcagcagcatgcgttctgccagtttgtaaccggtgctcctcggcttccacatggtggattggctgcccttagccccaagcttactatagttaggaaggtaccttttcatggtctatctatcgtggcatttgctataatgacatgtgcacacctattctgcttgatgttatttttggggtaactcggtgttttgattattgccagcatccttcaagtgctgtgaatacttcaaattcaactggggcagtagagtccgctgatgatgatttgcctagtgtgatgacgtgttatctgaagctgcccccctactccacaaaagtacagtgtccttgctgttttatcactaaaaagtcagcttgacattctgatggttcctgctgacgggctgttgctattgtttggacaggaaatcatgcgcaagaagttgctttatgcgatcctggaaggccgaggatcatttgatctttcataagaaatatacaatatccgaactaacatacaggggtcagttttattctggagatttagtttcttggtccatgtataacactgagttgaggttaccagctcactcagcaaacggcttcaagggcgagagccccagtcctcactcggatgcaggtgctgctgtcgatttctcccttcttttacatttgttcagctactgtattctcttcgagggttgcccttgtcacctgcaattatgaatctacagcttttgtcatcgaggaagtttaacagattttggtttctctaccatgatctgtttccattgggcaggctaagctatagtaattgaggatgtgcgccttgagtgaggatgtgcgccaacaagaacccccgtttgtttcagtacatgtaaataaaagggattttttgttccagaattgttatctgtaacaagaacatctacatctgtgatgactgaccattaataaatgtgtcccggtgtaccatttgtttt

SEQ ID NO: 124 - DNA, 20826 bp, Artificial sequence
  Synthetic polynucleotide
  misc_feature (1870)..(1969): n is a, c, g, or t
atgagccgaggccaggggtagcggtgtcagcacggacagaggcagagttggctcgaaaagaagactgggtcggccggagcctggccgggtcgtccgttagcgggaccgacgccagagttaatctgccgaggcctcgggctgggctgatgtcttcgggggacagctggtcgaggcctcggggtgaccagctgagccgcctgctcgagccggattcttggagaagaccctggcggcgatggcccgggcgtgatgatgatgtcgtccttcagagtggagatcctcggaccgcgtcgccgtccgaggctaggtcggacctctccgaaggtgtagttgacgccgagggtgctgctgctccctccaaccgtcaagatccgagcctgcaggatcggattatcttgttgtgtgtgttttctgcggccgccgaggcccaaacacaccctcgccgtgttgtaaagctgcgcttcttttcctcttgtttcgagtatctggactttttcgtcggtaacagaattgtctgtgcgagcgagagttgcttttcatggaaggtgatgagtgaggtatccgtatcccggaggcgtaggaatccttcggctcggtcggccttgccgcttacgcgcactcttgcccgtccatagggttctgtcaccgacgcagtcaagaaggcccgaagaatcgcttcagcagaggagctttcgagcgtgaagacttgttcggtccgcggaatcacttatccgaacgtgagttacttatcgcagaaggtgatgagtgaggtatctgtatcccggaggcgtaggagtccctcggctcggtcagccttggctgcttacgtgtactccgtcgttttcgggatccactttcgaagtagtcgaaaaggacgaaagacattctagcggaaaagatcttttttcgaggaaaaatttcgacgcagagggggttccccccttttagcccccgagggagggtcgggctttgccgaggcaaggctgacccttccttgatgactaaactttgcgtgggaatgaggtatgcgaacaaattgaaagcatcttaagggtagaagcgacgtagctgttggatgttccaagcgttgctgtagacctcgccttgactgttggccagcttgtacgttccgagcttcagaactttggcgatgacgaacgtcacttcccagggaggcgtgagcttgtgccgccctcgggcgtcctgtcgcagccgaagcactaggtcgcccacctggaggtctcgggaccggacccctcgggcgtggtagcatcgcagggactgctggtaccgcgccgagtgtagtaaggccatgtcccgagcctcttccagctggtccagcgagtcttctcgactagcttggttgctttggtcggcataggccctcgtcctcgaggaaccgtattctaagtctgtgggcaagatggcctcggccccatagactagaaagaacgacgtgaagcccgtggctcggctcggcgtcgtcctcaggctccagaccaccgaggggagttccttcatccatcgcttgccgaacttgttgaggtcgttgtagatccgaggcttgagtccttgtagaatcatgtcgttggcacgctctacttgcccattcgtcatggggtgagccatggcggcccagtccacccggatgtggtgatcctcgcagaagtctaggaactttctgccgatgaactgggtgccgttgtcggtgatgatggagttcgggaccccaaaacgatggatgatgttggtgaagaacgccacctcctgttcggacctgatgcgtttaggggtcggacctcgatccacttggagaatttgtcgatggcgaccaacaggtgccgtgtagccccgggtgccttctgcaagnnnnnnnnnnnnnnnnnnnnnnnnnnnnnnnnnnnnnnnnnnnnnnnnnnnnnnnnnnnnnnnnnnnnnnnnnnnnnnnnnnnnnnnnnnnnnnnnnnnnaagacaaggagttaaggaacacaactttgttcatggtacaccttgttctggagaaatgcaacaattacctttttattttctgtttacacattaccctgtcttgaatgctacagagtttctactgattagttcagtttatgactatatggtcttacttattctctgatacatttggcaaaggtaaaacttcagggccaacataggccatgctctcccctgatcattttagcaactctgcagaatatctgacagtattttgagctatattgctaatgaaacatgtaaatatgcttttggaaacactgaatttatcttcaaatcacaaccctctttgcctcctaacatcggctgcaagctctgccactggtttttgatagaacatttttctgctttctattgttgtttggatctctagaaataatatcttcacgtttgaaatactatgcatacagataatagacgcatacgtgtaccatctctttgtatttgtatgcatgctcttgatggtggcctaacatatatgctacgtttttttatttagtcattgcaagctcttaaaaaaatatccctggagcatccaactgcgtgcttgcgagctggtgcactaatggcagtcctatcataccttgactttttctccacaggtgttcaggtaatcactctctgcctattatagacttttgcatcacaaaatactttgtttgtttcagctcatttatctcatagcttattcttatgcattacttgtcattatattgtgacagatgaactgtattatttattcttgttatttatttttattactaactgttgtttttgttgatggaatgttttcagagagttgcattatctacagctgctaatatgtgtaggaaacttccttctgatgcatcagattttgtaatggaagcggttccacttcttactaatctactgaactatcatgattcaaaagtacaattgccattccaaatgctgatatcctctatgataccatttatgtttcagatgctgatattccgttttgcttattccaggtactggagcatgcttctgtctgccttacccgtattgcggaatctttttcaccatttccagaaaaattggatgagttgtgcagtcatggattggttgcacaagctgctagcttagtgtctgttagcaactcagcaggacaggcatccttgagtacatcaacatatacagtacgctccattttggctttttgggtacaattatttgttttacgtttgtgaagtttatgccatgtttttatagggtgtgattcgtcttctctcaatatgcgcaagtggatcacctctggcagctaaaacacttctccttcttggaattagtggcatacttaaagatatcctttcaggctctgggttggttgctggcacgactgtgtcccctgctttaacaagaccagctgatcaggtgattttgtcttttcataggcacttcaaggctctttgggtatcatgtgtgcttgatgtctacatttgttgtttatcttaacaagctaaggccccgtttggcactgctccacttcacaaaaacaagcgcaacttcatgaacttcaaaatatagcagcccagctttgaagttgcagagtttttgaagagtttggcttgtagaccagctttagtttcataaaaaaatataattaaaaaaaacttgtttcttcttcctttggccgtggcggccagaggcgcacgtgcgcgacttgggaagacagacacaacgctgcgatggcctggcgtggctctggcggcccagcgcgctgcacgcagcctggcggcacgttgtcggccgatgcggccctgctcgctagcgcaggcggtggcacgcgcgctgccagagtttggttcaggcgtggctctggcagcggcacatggcctggcggtgcggctgccggtcggcacggccctgctcgctggcgtaactgtgtgcggcctgagttcccttgagaacagaacgaaagaaaacatttcgtgagggattgcgtaactgatggcaaaggtgggtaatttcaccccaacttaatgagggagttaaaaatacccattcgtgaagtatacttttggttgtttcatggatttggtgaagttagggtcaacttcaccttttttggtgaagctgggagtgtttggctagagttttataaagctaagctagattttgtgaagtgaagcagtcccaaacattccctaagtgtaaattaatggagctaggcttactctatgcttcagatagtacttcaaccattgattccaatttccaagcctcaggatatcatctctattaaggccccctttggcacggctctggctctagcttcttgcagccccttggaaggagccctgccaaacagccatctaaaacacagctcctggcaaggagccagggccagaaaaatggtttctcccagctccttacaaacttgatacaaattattacaaaactgccactggacctgttttgaccaaaccttttccaaaacggcttcaactggcccaaattataaagccagcacaattaatcccatacacttcccaaccttacaagccccttaatacagcccatctcttccttcattctccatacatatctgaaagtcttccatgttctctctcttctaccacttcgtggcgcagtgaggggggcttacttctaggagcgcctaacatgtgctatataacatctttacgcacaatgacataggaacaagtgtcgtcaaagaaaacaaataatatttgtgtatattaaaacattttttgatgaatttgatgaaatgaaaccaaatcgtcccataacatgtttttctcataatgcattttgttttttaatcgccaccaataatatactttgagcttgtagtcaatgttcgtttatggtatgacattgtttttctttaatgtgagcatactcatactacttcccatgtcgagcatttgtgaacatgatgttatcctatgttctattcatgatagcacaatttatatttgtgatgaattgtcatctatgttaaattttaatgggtactgtaacttgtaaagctactgactttttggtagtaatagattatcaccacacaattccatatgcaaatgatgccattatgtgttttttggtattacacagatgaatgagattgtgaagcttgcagatgagttacttccttctctgcctgttgggaccatttctttaccagtgtattctggtgttcacatgaaaggttgttctgtaaagaaatccacttctagtaagcagggtgaacatggttcaacagcaaatgaactatcaggtcgggagaagttattgcgtgatcagcctgaacttctgcagcaatttggcatggacctgttacctaccatgacacaggtcagtcttgtcttattaatgttctctttgatgttgttaatggtaatgctgatgtggtattacgggacattgttgctatcatgttggtgtgatacttaaggacttcaataccttgaacaggtgtatggctctagtgtaagtggaccaatacggcacaggtgcttatctgtcattgggaaattaatgtactatagctcagctgagatgatccagtctctccttagcacaacaaacatttccaggtgcttaacacaatatatttcatcgagttatctcatgttattagaaactatcttatcacatgaattccaaatatttgtttcaagctattaacttctatatcaaccattgcagttttttggctggcattttagcttggaaagatccacaagtgttgatccctgctcttcagatagcagaagttttaatggaaaagcttccagagatttttttgaagatgtttgtgagggaaggcgttgttcatgctgttgagtcacttatatgcccagaattatctggtcaggtgactcctcatgtggattccattacatcttcacataataggcgcaaccgccgtagaaataatgctgtgaacactggaaataacttgcctgatggaccaaaaggttccaattctatgattgccaattcacccccaagcatggctgaagttccaaataatagtcttcgtgctttagttagtaatcatgcaaagtcatttaaggataaatatttcccttccgagcctggctcaagtgacattgcagttaccgatgaccttcttaaactgagggcactttgtgcaaaactgaatacaacagctgacactatcaaaacaaaagctaaaggaaaatcaaaggtagtgtctgacaatagttttgatgtcttgtgcaatattgaggagcaattggatgatataatagctgaaatgttgtctgagcttagcaagggtgatggtgtttcgacatttgagttcatcggaagtggagttgttacggctttgctaacctatctgtcatgtggaacatttgggagggaaaaggtgtctgaggcaaacataccaaatttgcgtcatcaggcagtcagacgatacaaagcatttatatcttttgcacttccaaatgataaagatgggaataaaactcctatggcattcctagtccataaactgcaaagtgccctatcttcgttggaacgtttcccagttgtgctcagccattctggaagggcatcgactttgggaggatcccgcctgacaacaggtttaggatctctgtcgcagcccatcaaattgcgtctttgtcgagcgcctggtgagaagtcacttaaggatttttcgtccaatgttgttcttattgactcattagctagtctggcagctgttgaagattttctttggcctagagtccagcgcactgaaccagtattgaagcctccaatgtcatctgcaaataattctggatctggagcagcaagctccacagcttgtgcgccttcaattccatcagaaactcaatctgtccgtcgcacatcgttaagatcaaagtcatcagctgccaccagtggtgcaattaagaaggattatcaggagggaagcataaacacctcaaagggaaaaggaaaagctgttcttaaattgagtttggatgaacctaaaggcccacatactaggaatgctgcgcgcagaaaagctacttcagagaaagatgttgaactgaagccatcacatggtcacatcacttcagaggttagatactcgtgcattcaatcttatttgttatttgcataatatatgcgaaatggcctctagcctagtggttaaaggcttccgaatagcacctccaagtctcgggttcgattcccctcaggggcgaattttccggcttcctgtgcgccaccctccggttggaccgctgtagaggggacggttgacgtcagctcgttagtgatggggaggggggggggcagagtttggggattttcttggccgagaccattgttttagtctatcttgatataataccgggatggcggtcattccttccctggctgagttttttttatttgcataatatatcaattgagccctcctaagtgagctccgttgggaagtttagctttaatttctggctctaggacacattgattgcaaatgtttttttaacaatgccttttgtttactcagctgacaaatgttatcatagtaatgatacaacagtaatgcagctgatttattttgccttaagtgtatctagtttgatcagtactttgttttagtatgtaagcaaaggatttcaaagggatgttcttcatagacatgatgtacagattgtataactataaaaggagggggggcagtgctgcaggctccgacatgaggagtctggggaagggataaaccgaggcaacccttctcccgtaaatacggagagacactgctttgaacccacaacctggtgactccgggagacaattcacaccactgacgtacagattgtataactataagtctataatatcataaatgtataacaatgaaaatgcactgaactgtggcatttctgtgtatcatgcatttataatattatatctgagataggatataaaaactgaagcattttttataagagcaacaaagattaaagtagaaatatgcctgtttcactaatattttataatttagtcatattatgtaatgacctgactacgctttcgtaacttagtatactggactatattgtggatactcacaaatatgaaatatcagtgtaatcttttactctaattctctaaataaaagatattgttgtattttgattttaaatatctaagtgaagttttcaggggaaacaactttatgaattattatttggaatagtacgtgcatgttcttttataagtttgatatctgaattttagaaattaaaaagtttgaaagccctgcaacatatatttatattattatacctgcaggatgaagatcttgatgcttctcctgttgagattgatgatgctttaattcttgatgatgatgacgaggatgtcccagatgatgaagatgatgatcatgaggcggtaattattttttaaatcttgcttattactacaaaggtttgtattgaggggacatgatttggaactcagtagattttgttgaaatgatcaggttctccgaggttctcttccttcctgtgttcctgagagagtgcatgatgtgaaattaggagatgctgatgattctagtgttgcctcattggcaaatgataaccaggcacagccctcatctggttctagtacaaaaaatacttctagcaggggattggacactgctgaatttagaagtccagccacatttggttcacgaggtgcaatgtcgtttgctgcagctgcaatggctggattaactccagtaggtggtcgtggaattagaggtagccgagatcggaatggccttccattgggtgctcgtgcaactgagcattacaacaaattgatatttacagctgctgggaagcagctgaacaaacatttgactgtatatcaagctgttcaaagacaagtagttcatgccgaggatgatgaagatcggttcggtggatctgatttacctgatgatggtaaccacttctgggatgatataaggggtgatgtgttcactataacgtatcagaaggctgataacacagcggagaaggggtctgttggaggttcagcttcagtgccaaaatcttccaaatcagattcttgcagaactttgtctgaaaaacagcgtacttctcttcttgatagtattttgcaaggagagcttccctgtgatttagagaaatcaaaccaaacctacaatatcttatcactattacatgtgttggagggtttgaatcagttatcacctcgtctgagactgcagtcagcctgtgatgattttgctgaaggaaaagttgctacattaaatgggctatacgatgttggagctaaggtaccctcaaaggagtttatcaacagtaagatgaccccaaaacttgctcggcaaattcaggatgttcttgcactgtgtagtggcagtttaccatcttggtgttatcagctgacgaaagcttgtccttttctgtttcctttcgaaacacgaaggcaatacttctattccacagcttttgggttgtctcgtgcacttcatcgtcttcagcaacaaccgggcaatgataataacactgcttttgaaagagaagtcaggattggtagattgcaacgccagaaagtccgtgtttctcgtaaccgtatcttggattctgcagctaaagttatggagatgttctctaatcaaaaggctgtcctagaagttgaatactttggtgaagttggaactggtcttggtccaactttggagttttatactctcttaagccgtgagctgcaaagggttgacttaggattgtggagatctcattcttcagataattctgggatgcaaattgatgcgaatactgatgatttaataagaagtaaaaatcatgaatcagaatcacttactgagagcaggaacatagtacaatcacctcttggattatttcctcagccttggccacctactgctgctgcatcagaaggtagcaaattcttcaaagttgtcgagtatttccgcttagttggtcgagtgatggcaaaagcattgcaagatggaaggcttctcgatttgcctttgtcgacagcattttacaaacttttgcttggacaagtaagcatgagggcctccttgagctagttttatcttatgttgtcttctaaaaccttcctcttttcggttggcacttaactttctgtgccttttccttattaatttaccaaatttgctttaataggaacttgatttatatgatatattatcttttgataccgagttcggaaagacattgcaagaactgcaaattctcgttgcacgtaaacaatttttggactcctgctctagtgagagccaaaagatagatctatgtttccgtggtgctcccgttgaagatttatatttggacttcactcttccgggctatcctgaatatgttctcaaggaaggtggagagaatgcagaggtaagttatatgataccttagtttgtttttttcttctagtgttgctgcagatgactcattgttatcctgtcttataggtcaacatttgtaacttagaagagtatatttctttggttgtggatgctactgttaagaccggcataatgcggcaagtagaggcatttaaggcaggattcaatcaggtcttctttcttattttgtgatttgtgggcaatttctattaataattgatcctagaactaactagcacatttatttatttattcagaaaaaaatactcattgtatatttctcacttcaggtgtttgacatatcatcactgcaaatattttctcctcaagaacttgattatctgatttgtggtcgctgtgaactttgggaggtattgcttttgtggtcattcttgatgttgtacttcctctgtcccagaatgataagcatagtttgtataggaaaaagtcaaatttagaattttatttcccagaaattgcttgtattatactagtttatgtggctttgtgtcccgctgccataggtcaatgttagctattgaaagctagttgctctagtctactgcttccctttttttttcgggcggggggggggggggggggggtattctccctcctttgcagttcaccttttttctctcttaatgaaatgatacacaattctcttttgtgttcgagaattctttttacaaactttggccaacaattaatcaaattatatacatgttttggacaaacttgcatcaatagattcatattcagagtgcatttgagatgtgattaattgtttagcaaacataaacatattgtacgagaaattaatggtcaatttttttaatagattatatgagttattgtactcagtctaagtgttatggaccctggtcccgcccatgtaactccttttccaatatatgcaacgtagcccaccctgattggagttaacatggtagcaagcttggtcttttctctccctcccttccctagccgccacctcctggctgccatcactaccgtcgggtcgctattgtcgtctgcgcctccatctcctccctagcgcctttcttgctcatcggccacccatatttattaaggcagtgttaataaccatggggccaccaccttcactttagctttctaggcgcgactggtggccttgttggccctacggttggcgccttgcccaccggtgctttagtcccggtcacctcgattgctgccctagtcgctcccgtcgcccttgcctttgctgtggccatctatggcatgggtgccgccagccagggcccagacctagctgactctggcctagcttatctttcggtcgcgttacttccccctgatgtcgctttcgctcactccaccttggccatagcccccattgctgccaagacggtgtttgctgctgctcgggatcgggaacatgttgctgcccttgcttaggggcacaaacgcaccacgacggatgcactcgctcgatagcagaccaatgctgagggtcacctgctcggctcctcctgcatcgagaccctcccagcgctctagtggtcgcccctttgtcggagtacgaggtcgagatcatcaccaacctctatgccgaggtggcgtgtgtccagaacatttgctctatgattcccgtcatccttgacacaacttcctccaactacgccttctggcgggcgatcttgtcttcactctccatcgctacgccttggactaccacgtcctcaccaacactgtctccctcactaacctatcctggcggcagatggatagtgtggtcctctcgtggatccccaggaccgccatcgttgcgctgcatgacgtggtttgcgagcgtggtggcactatccgtcttggacgtcgtcgagtagttccttggcaatcgtgaggcttgcactctctaccttgatgtcgcctttcagacttttgtctaggggaacctctttgtcactgagtacttttgtcagaggaagggcatgcaagcctccctctatgaccttggggagcccgtctcccatagcatgctcatcctcaacctcctgcatggccttcacctccacacttcgatcacttcctcagttccgttccacaaggtcaaggtcaacaacgacctcatttccgaggagctcaccaaggggctgctaccaccctctacaactccaccactggggggccagcgcatgcaccctcttctactactatcttgggaggatcgtcgttgcgctcgtctgttcatcaaatctcaagcattgcacatcctccccacttgccttggtctgaggggaggggtctagggtggcggtcgacgaaaaggcggtcgtggtggtggccatggggacactccttggccttccatctacaacctgtggactgatcgcatctccatgtggcctggtccttctccgagagtcccttctcagcgtatcactccaccgtagccagctcacttgacattgctcggtctggggtatcaccttggccatcctacgccattagcacctgagtcaccacttctgtcactgccaccccacttcgctttgtcctggaacccgtggccaggtgggtgggatcaacagtctcttgctagctccttcaacacgatgaccttgactcctcccactgtcacctactaggtggctgattcctggtgcctcctatcacaccactttggacgcgagtatgctatattcttatccacctcttcgtctactcctaccattgtgggtaacgagaacattctctcggtcacctctgtcagtgattcggttcttcctaggccctttcaccttcacaatgttcttgttgccccacatatcctttaatattttatccgttcacctattgagcatcggtaattcttgttccatagattttgatccttttggcttgtctgtgaaggatcttgctacctagagtcttcttgcttgttttgatagatctaggcccctgtacacccatgcaagcctgcgtctacctccccacatactggtttcgctacatcatcacattcgtcctcgctacagtcgcctactttgactacttccactatttgtagtacttggcatcgtcgacttgtccatcccaaccttgtagcgtagtccaagctatgtagtactttagtaatttcttgtagtaggggcacccttgagcatctatgccagttgtgtaagttaggtcgtcattttcgacttcctttctctagcttctcacaacatacgctgtgatttgtggacctctccagctctcctgttaccaatgttttgggatataaatattatttggtgattcttgatgattgctctcattgtttgtggatttttccattgagtttaaagtctgacacctttacgactctgctcggttacttcgcttgggtttacacttagtttggttgcactatgaagatcgtccagtgtgacaatggtcgtgagtttgataacttctctcgatcctttacctcacttggagtctaccttcgaatgtcttgcccctacacttcccatcagagtggtaaggctgagtgtatgatttgcaccacgaataatgtaatgtgttccttgatatttcaatcatctgtttccgctcgctagtgggatgggagcctccacactgctacctacctccttaattgtcttcctactacgacaactcttatgtcatgccccccaccccactttgctcgaatggcaaggcttagcgcatgaattaatgtcatgtttttcttgctattttactattttaggcatccgttccttctccttactggtctgagagcctccacaccaccacctacctctttaattgttttcctattacagcgactcgtgcccccacttcccactttgctctttttgtcaacactccaatgaccatcttcgtgttttgggtatgtgtgccaccctaacctttccaccactactctccatcttgttcttcgttctgctcgctgtgtctttctcgggtactcatctgatcacaaagggtactggtgtcttgacctcaccactcatcgccatttgatctctcatcacgtcatattcgttgggatggatgtccccttctcaactaacacctagcccaccaccgcctcccctttcgagttgtattttcttcatgatcctgactccgtggtgccctttgtccaaccactgtttttctagttgctgttttcctctccactgtttcagccggtggcccctgtgtgcccatggtggatcatacacccttgaattcctttcgggttgcaccgttgcccctcgtcgacctgtgtgtcacctcgtcaacccatgttgggtccctaggccccggtggccccacttttgacattgccttcgttgctagggccctctttattgccctcgcctgtgccctcgccttgttgctatgcccaacctgtgcatttctatcagcgacatgcccgagtgggtacaccgcctcgctcttgcgacgagccgacaatgtatcaccccttcatcgtgactctcaccacatccacttgatggcgaattgccaggccactggggtccttagccctgttgattgcctcatcctctccgtgacctcctcattgtcggtttctcatgtgtcgtcttgcgttgattgcaccctttctaatactcattggcgccacgctatgaagaaagagtatctgactatccttgccaatcacacctgggttctggtattctggtgccccatctttcgtgcgacaatgtggtgattgacaagtgggtctggacacataagtggcaggcggctggctcgctgggctactcagtgtcgtgctgttgactacgatgagacgttaattctcgttgtgaagcctgctaccgaccgtgccatcctcactttggccctctcccattttcggccaattcatcacttggatgtcaaaaatgcttttctgcatgggactctcacttagacttgtctactgctgtcagcctactagctgtgttgatcatgcacaccccggtatggtatgcaagctcaacaaagtatgcaaactcaacaagtccctctatggttcgaggcaagccccacacgtttggtacaaccgcttcaccatatatctgctctctttgttttgttgaggccaagttagacacatttctgttcatctatcggtgtggtagtgacactgtatacctactcctatatgttgatgacatcgtgctcactacctcctttctcatgcactagatcaccaccgctcttcagcatgagttcaccatgaaggatttaggcccccttcaccactttatggggattgctgttgagcatcgctttgatggcctcttttttcagcagcgacgatacaccctggacatcctcgagcgtgctggcattctggattgcaagccttgtgtggcgtcagtggacatgtaggccaagctctctggcgtcagtgctccagtcagtggccccatcacctaccatagcctcatcggtgctcttcaccatctcaccttcaccagacctgacatcgtgtatgccatccaacaagtatgtctttatatgcatgatccctgtgacctgtacttgggtgtggtcaagtggatccttattgttgactatggtctcctcctttggcgctccttcatccatgagctaatcatctatactgacgccgatgggccgagtgtcctggacacctgtcggtatacctcggcgaacctcatctcctggtcctccaagcggtagccagtggtctcccgttccagtgctgacgttgagtactggctgttgctaatggggtggctgaggcgagcaagctgcaccaacttctccagtagcttcacaacccactcaccatgagtaccctggtctactacgacaacgtcagcatcgtctacctctctgtcaacccttttcaacaccaccgtattgaccgttttactattggggacgtccgcgtatgtttcaacgagctcgtagtttgatgacaccttcactaagggttttcccttgttcttggagtttcggttgttggggcgggagacagaaccggtcctcaactaccaattgtactcaccactcaccaagattcctaatgcagagtaaccgactaggaggtgcgaaggcctatggcggaaggggcaagccgcggaggccgaccccaacttcggtccttcctaacaatcgcgaaggctacttgactacgcagggaccttggccaaacctcgacgagggacaaacacgttcagcgagggcaggcgggggctaggacgcgtcgaagacccccgaagcaccgaacgaagacccaactgctaccagccgatgttgaccgaggcgagatcactcctctttggtaggccgtcgtgaggcagtttttctctaaggcccccacgcagaggccataagacgaggaatgttggattccgccaagcggcggctcagttgtgggcgtagactcgcctactccacacgtcagcctttgatgtgggtgagaaagatggtgtaatatggaatgtagccaggggacctgtaattaccccgttgcacacctgttgcacggtatatttgtggcatgtagtaggtaaccaagggcattacgatattttaggccttgggcccttggccgccctatagatagccccatcctgtagctggatgggacacacttgacaagacatttgtgctcccagccaattgttttgtcgtgccacctgtaacaccgctctcgagtgcttgggcacactgttctaagtcccaacatcggtccagtctcaacatcttccactactagagtttcatctgcgggggtgggggtaggggtgttagattcttgtgcgttattgtactcaatttaagtgttatgggccttggcccagcccatgtaacccatgcaacacagtttaccctaatttgggttaggtttccaacaattttgtttgacttttccattatcaaaacacacttaggccttgttcgtttacgtcggattgcacccggaaacgttccagctaatcaaagtttatataaattagagaagcaatccggctaggaatcgttccgacccaccaatccgacacaaacgaacaagaccttaatatttcacgatgaatactcaatttaagtgttatgggccttggcccagcccatgtaacccatgcaacacagttcaccctaatttgggttaggtttccaacaattttgtttgacttttccattatcaaaacacacttaataagttaatatttcacgatgaatgtagttgttttggcttattctgaacaatttcacatcatgcagccggaaacactgcctgaacatataaaattcgaccatggttatacctctaagagtcctgcaattgttaatgtaagtttccctgcttctttgtaattcatttgtaggtttcgtaagtttatttggatgtttctaatgttgtgttttgcagtttcttgagatcatggcagaatttactcctgagcagcaacatgctttctgccagtttgtgactggtgctcctcggcttccacctgggggtttggctgctctaaatcctaagttgaccattgttaggaaggtaaattggctatctttgttcttatttgtactttatggttgacatgcctgcccacattgttgaagttttgaattcttcttaaattccagcactcttctgtggcaaataatagttcaaatgcaactggagcgacagagtctgcagatgatgaactatcttaaactaccaccatactccaccaaggtatgcttctttctgctttttggctaactgtggttatatctcctgtattgtcttataaattgaggattcagaaacccagtcaccaaagaattacttcatatagccttatcgtaacaggtaactggacaaattttcaactaaggacgtggaaactaaaatttaatgtgggcagcaccttccagccactcattagttagaattattatttcgttagtttaaatcaaatagcatattccacattgcttgaaccctttatattgacgcatgctggttttttttctggaaggaaatatttacagtgctactcgtgctagtgtgtggcttgttatctgtgtctgaattttgttgaaaacttcttgcaggctatcatgctaaagaaactgctttatgcgatcaacgaaggccaagggtcatttgatctttcgtgaatctcaacactaacataggtattggtccacctagaaatctgcgtcattgttacccagagttagtttctacctcattcatgtatgacataggttaaactcagctctccggagtcccaccgaaggtttggagcccgtacctttgggtgtggatgtctatactctcttttcttggttgtatattcttgcggatctttatagtgaataatagtaataaattgttttgcgcttcttactgtgctaatcatcagtgtcccacccgaagcgtcagccgtcagtcgtacaaattttgctcgatggtttcgctgcccacaaatcggatggatgggggcccatgaacaagggcacgggatttccggggctatctgaaatagtgacgggcatgcaaacacacccaaggtccacggcctgcttttggtcgacacagtgccacgcgaccgtgctggatcttatcactggcctgtcagaggcatctgaggatgtcaagttgtcaaccgaggcgcctatgtgggcacgggactgatcactttcactcgggtcacagcgttcggtcttggcgcttcagccacaaccccaaggatgacgatagctgggcacaaggccacgacagttgcacagatcccctcgtctcgtttgcaggtaccagcgaaattgctaacgtgcgatgcgacccgctgcgaaaactacggatcacgtatcagcggtcgttgtcatatatgatcagtcggccgtgccttggcactgcacaagccaataaaactccgccagaactgaggaaagatggaaccgtccaggagttgctaagccatcgattgcacggatagtatggcaagcggtacatccagtaggtggtttgacctaacattagtgtctgatcccgttagaacatctctaactccgtcttaaattaatgcactatcataaaatataggacttataaaaaacagttccaccagtgccttaatctaaaatttttcatcaaaaaatataggccaaactatgaaatgatctaaatatactacacccccggctagtgtcctatctttatgttgtacattattttcaatattttcttttctaataatgtaatttactttccaaattatatgatttaaggcttaactgttggagtataatttatttttagatccctaaacattttaaacgatgtagtattttaatttttagggcactattttgagccaacttgttggagatgctcttaggttacctacggattccggataaaaaaatcttgaaatttctgccataagattctagaggaatctaacacacaggcacaaaattcaatgaatactagagattatttttatccagaatccagttgatgttggctattattttattcttctattttggatccaaagaaaagaagaagagtaaatccatagaaattcctaactaaaaatgtgatttctaaagatttcattgtaattcttcgaattatcgaacaaatccaatccaacataatacaatttttttgaaattagtaaattaagtaataaagcatagagaaataattaaagaatacaatcgttatccatcttttctttcttttttgcttcatatactaaaaagaattcaaaaaggcaaaattttcgtcatgtcatgaagaattctatctcttgtatacgaataactaggatttaaagaaggaaatgacaaagcatatgtgaataaacgattggtttctatcataaacctgctaaagcctcaaaccactgagtacttagcacgggtgctacaaagagatatgtttttacatatataatcagatactcttgtccaagatcatttgtatttcttttgtttaggctaatttcctaactaaaaaagaaaaataaatatcgtatatatagaatgaaccatatagatgagatttttctatcaagtgagatgtgaaaaaatgttgttggctgtgagctgtaaaaagctaaaaatagtttagtggaagctgctagaatccactaaaatttcttctattatatttttacacggttccatctgaaagttgctaaaaacaagttcatagtgcttccaattttgtaaaccgaggcaatcgtttttttaaaaagctgattcttgaattgagtccttcggtttggcttttggctcttgagaggcaaaagccaaagccaaaagccaaaccaaacataccatttgttattctacacttaaaacaaactaatatataactcgttaatatcagttccaa

SEQ ID NO: 125 - DNA, 10181 bp, Artificial sequence
  Synthetic polynucleotide
aggcctggagttgccgaccacgagagatcctgaccagcagttgctgggctgtgtgtgtgtctgcgtctgtcactctcctctctcgcgtcttggtcctcctcctccccttcatcgaacgaatccatccaaggcaaaagggaacgagggaagcaagcaaaaaatccccaattcctcctagatcgatccaccgccgacgggacgaatccaatccaggagctatcggctggaattggattcacgcgcacccgcccgctgccgctggccgccgcctagtctcggccggccggccgaccggccgccctccccgcgcgcgcgccttgccttgtatggaaacacgcagcagcagtcgcaagcgcgcagcggccgccgcctcctcgtccgcctccaagcgcccccgccgcaactcctcttcctcctcctctgcgccgccgcgccagcagccaccgatggaaccctcgccctcctcccgccgccgctcccgcgccgccgccgccgacaagggcaaggaccccgaccccgcctcctccgaccacccttccccacccgcccctgacgatgacgccgacgtcaccttcccccagcccttcacctccgccagcaccgccctccagggcctcctccgcaggctcggcgccggcctcgacgacctcctcccatcctcctcctcagcgccctcctccgccacgtccggtcacctcaagaggatcctcgccggcctgcaggcgcacggcgacgagtcgcgccagctccagtccctcatgcagctctgcgagatgctctccatcggcaccgaggactcgctcgccgccttcccggtcgatgcttttgtcccaatcctcgtcgggatgctcggccgcgaggacgagcctgccaccgctggtgccagccccgacgtcatgctgctcgcggcgcgggcactctccaacctcgttgatgtgctcccctcctcctgctccgcggtcgtgcactacggggccatacagtgcttctgtgctcgactgctcaccatcgagtacatggacctcgctgagcaggtggtgccttccctttgtcttcttcttcctcgttttatcctgtatcatcgctcatcctcactatcatctaaaaatgaaatatgatcagtcatcctctgcatgcatgcccttagccccttaccaaggtgctgctaacacatttactttactcgcctgctcagtctctacaagcccttaagaagatctctctggagcacccaactgcctgtttgcgagctggtgccctaatggctgttctatcgtatctcgacttcttctccactggggttcaggtcgggtcctctgatctccttacaaccgttcttatcttgtgcactgtttgcatctacttacacctcttcccatgggggacgtacttgttgtagagggtagccttgtctaccgctgcaaatatttgcaggaagctgccgtccgatgcttccgagtttgtcatggaagctgtccccttgctcacgaatcttctaaatcaccatgattccaaggtactttgcaagctcagacaaccatacctctggattatgatatattgaggtatatcatgtatttcccaacccttcatctatgtgccttacaggtactagagcatgcttctgtttgtttgacacgcattgctgaagcttttgcctattaccccgacaaacttgatgaactctgcaatcatggattagttgctcaagctgctagcttgatagctgttggcaactcatctggccagacatcactgagcacatccacatatacagtatgggccattttattttgatacccttttattgtttgctgtggcccctctttctcacacttatgctaaaattaggttgcacgcttttcagggcttaatccgtcttctctcaatatgtgcaagtggatccctgctggcagttaaaacactacttcttcttgggatcagcggcactcttaaagatatcctttctggctctgctttgatttctggaacatcagtctcccctgctgtaacaaggcctgcagatcaggtgaatatttctatcactgacttaggacttgactattctgctagtgctggccttttaaaaaaaaatcaatttagccacaatttctctctgtgattggattcaataaaattccgatttatcagtgaaaaattaggctttggcatctcacactttctgaaattacatctaccacacgtatcatgcagacttttagaactctaaaggcgacatcacatgttcataattatatgtaccattgagcaattgtttgggtgatttttttgagcattgaacatagatgctaaaatgtcgggaattgtgctcgtcttcttaaaccatgcaaataatcattcaaaagagcagtgaactagtattttcaaaggcctgcatactttcgttgtgcttttatattgcctgagtaagtcttttgaaatgttttaatgaagcagaaaatgttgatttatggcacacaggggaacaaaagtctcacttgtaatatgatagagcaaaatctcatttggattaagtagctgctgtgattcttgtcgtcttattttcttcctagtgtggtgcaagtaaattgtgcttttggtcaatcgcatttggtatggtacagatcgaagagttttttttccatgctatacaattgagtatgaatatataatgccatctcagcttctgcttgttgctgtcttgcttaattgctaaaatcatttgtggtacatacacacacgagtctggcattttttgagtatgatcgtctgcaacagctgctgtatcttctcacctagctgctgaaacattaattcttgaaacccacactgtttgactcatcagtttcatgcacctgtatgttttttgttgtacaaatgtttttcatatgtttaccccaaatattgcagatgtttgagattgtgagccttgccgatgatttgcttccgcatatccctgcgagaatcattaagttaccaacatattaccatacatataaaggctcttcaacaaagaaatctgcttccatcaaacaagaggggggtggttcaacaggaaatgaaaggtctggccgtgagaggctattgcgtgagcaacctgagcttttacaacagtttggtatggatttgttacccacaatgacacaggttagtgctggaattcttttcctgagtcctgacagccatttcaattgctatttgtgttttgtctttgtgtactttaatagcctgtgtgcttgttcaggtgtatggttctagtgtaaatgcaccaatacgtcacaagtgtttatctatcattggaaaattaatgtactacagctccgccgaaacaatccagtctctccttggcacaacaaacatatccaggttttctctctctctcacctggaacacacaaaagagatgcatgtttcattaatagaaccgaaaaaattctcagttcatttctagagaatgatttcagaacaatggatgttaaaagacaaaaagaaagtctctcaagtctcaatgtacatacttcttttccaatcccttctaagttatttcatttctatctgcagcttccttgcgggcattcttgcatggaaagatcctcaagtgttgattcctgctcttcagatagcagaaataatgatggaaaagcttccagagacattttccaagttatttgtgagggaaggtgtcgttcatgctgtggagtcactcatatgttcagaatcttccaacaaaatgccttctcaggtgccacctcaggataaagataaagattctgccatgccatcacgttctagacgtcaacgccggcgtgcgggtgctgttgcagcagaaaatagttcattggatgaatcaaatagttccaaccttggtgttatgtgctcaacagcaaccgcttcagaagctccaaacaccagccttcgtttcacagttagtgaccatgcaaagtctttcaaagataaatactttccggcggatactgattcaagtgatatcgggtttactgatgaccttcttaaactgagggcactctgtgcaaagttgaatactgtctctgagaacgtcaaaacaaaagcaaaagggaaatcaaaagctataagcactaattttttggacatctcaattgatgttgaagaacaattagacaaaataatatctgaaatgctctctgagcttagcaaagttaatggtgtttccacatttgaattcattagaagtggtgttgtcatagcattgcttgactatttgtcctgtgggacatttgggaaggaaaaggtatctgaaggaaacctatctcagcttcgtcagcaggcccttagacgatacaaaaccttcatatctgttgccctttctattgatcatggacgagatgaaactcccatggcactgttggttcagaaactgcaaagtgcattgtcttcgctggaacgtttccctgttgtgctcagccagtctagtaggattggtattggagggtctcgtctgacttcaggtcttagtgctctggctcaacccttcaagcttcgtctttcccgagctcaaggcgaaaaatcacttcgggattattcatcaaatattgtgcttatcgacccatttgctagtcttgcatctgttgaagaattcctttggcctagagttcaacgcagtgaggttgcatcgaagcctataattccatctggtaataattctgaatctggggttcctggcaccacggctggtgcatcattaacagctgcaatggctcaatctggtcggcgcccaacaacaagatcaaagtcatctgctgcaggtggtcttacatctaagaaggattctcatgatgaaagcactagtactgccaaaggaaaaggaaaagctattgtaaagccaaactcagatgaatcaaaaggacctaatacaaggaatgctgcccaccaaaaatctgcttcagagaaagatttggaaatgaagcaggcacatggccacagtagctctgaggtattttttttgtttacatgcctcattcctggttagtttggcttgcaaagaaaagttactgtttctattcaagttgggtagcagctcttctcaaaagtcgcattgtcagggcctaaggaggcccacggaggggctgcggcagcagcagccatgggccctccaagggggattagataatgatagttagagataagattagaagattagttgagattatttaggagattagttgagattatctaggaaggttatcagttagtttgttgagagtttttaggagagttttaaggagataaaggtctcaagctagacaagggcggccacccggtctatttatgtaatcaatggataagaaataaattaggcaagaattagaagggagaaaccctcctcttgctcggccgtgggcagaggccctcggccgacgttcctgcccgtcgatacccctctctaatccctcaccgatttagcgtccataacacacatccacttctctggtgtcatatttggtgccacctataaagctcatggcttgggcgccaaatgaacatgataattttagccgcggatctagttcttaatttatattaccctcataatatgtaaacatgattttgtgagttcaaaactgtgccaatctaaaaaatattaggataatgatcaagaagtaggctcattttctagttgagagtgtaagcatggtaactgataagtaaatacattctatgttggtatatgtaggatgaagagctcgacacatctcctgttgagatcgatgatgctttgatgattgatgatgatgacatttcagatgatgatgatgatgacgacgatgatcatgaggtaactgtttgaaaattgaatgcccactcttttttttgcttcgttgcaaccatccgtagttgcttaggttcatattcaaggtactaaatagcatgggttcatagcagtttgatgttgcggatgtcaggtgctattacggaccgctaagttccaatagcagtatataataatcaaacataaatttatgtatatatatatcattaatattaatttaatagacgtttaattaattatacttagataagtgatgtctcacatcattattatcaacaaagccttttagccccaagcaagttggggtaggctagagttgaaacccatcggaagccacaaattaaggttgaggcatgtggaaatcgatgtctcactctcacatactttaaattaaataaaggaacatgatattcaacatattacatataagtcatcacacattggactggagtctacaaagaaatatattttgatagccgtaaaatagtcataaaatcatgtttcattgtcatgtcagaagtagtaacctcaatagtttcatgatagttaaaatgggatagggttatttgttgtatatcatacaacactattgtggacactatgaagaagtgcggagcactataacagcctgctacctcaaatagcagccgctaagttccaacctcaaatagtggtagcggtaagagaccgctaccgttttttgcggacgccatagcggttgctactaacgctatttagtaccatgcttatatttatttactttatgacaaaaataaccttttagttggtccaagatgatcatttgtgcccttacttgactaatttaataacctctccaaattcttaggttctccaagaagggtctcttccaatctgttctcaagatggtgtgcatgacgtgaaactgggtgatgccgatgaatctaacattggatcagctacttttagccatgcacagccatcatctggttctggggctagaaacacttctagcaggggaccggattctactgaatttcgaagtatgggcacattcggttcacgaggtgcaatgtcatttgttgctgcgacgatggctggtctggcttctgttggtggtcgcagtgttagaggtgtccgagatcggcgtggtctgtcacttggaggtagcatgaatgatcacaataaacttatattcactgctggtggcaagcagcttaacaaacatttgactgtatatcaagctatccaacgtcaacttatgctcgacgaggatgatgaagaaaggtttaatggatctgatataccaaatgatggaaaccgcttctggggtgatgtgttcacaataacgtaccagaaggctgataaccaagttgagaagggttgccaagggacttccacctcattaaacataaaatcagattcttacaggtccatttctgaagcacaaggggtttctcttcttgatagcatcttacaaggagaacttccttgtgatcttgagaggacaaactcaacgtacaacattttagcattattgcgtatacttgaggggcttaatcagttatcccctcgtttaagagtacagggagcatctgatgattttgctgagggaaaaatcaataccctggatgagttatatagaactggagccaaggtaccttctgaagtgtttgtcaatagcaagttaacaccaaagcttgctcggcaaatgcaggacgttctcgcactatgtagtggcagtttaccttcttggtgttatcaaatgaccaaggcctgcccattcctgtttccttttgagacaaggaggcagtacttctattccacagcctttgggttgtcacgagcattgaatcgactccagcaacagcagagtgataatcacagctctggtggtgaaagagaggtcaggtttggcaggttacaacgccagaaagttcgtgtttcccgtaaccgtattctagattctgctgctaaagttatggagatgttctccagtcagagggctgttcttgaggtggaatactttggcgaagttggaactgggctggggcctactctagagttttatactctcttaagccatgaactacaatgtgctcaactgggattatggagagctacttcttcatatgattcaggattgcacactgatatgaaggatgtgatccgtttagatcctgaagatgggtcgtcaggaaaagaactcaacacagatctaccaggtgatggcatgtatttgatacaagctcctcttggattgttccctcgaccttggccacctaaagttgatacttcagaaggtagcagattcttcaaagttttggagtatttccgcttaataggtcaagtgatcgcaaaagtcctgcaagatggcagacttttagatttgcctttatcaacagcgttttataagcttatacttggacaggtatgtacagagaagctctatttccaagtgctttgctttcattttgttttgctttgttttatgtattaattagttgtttgtattcacttttcacgacttaatgtgttgcaattggccaggaacttgatttgtttgacatagtgtcatttgattctgagtttgggaagacattgcaagaactgcaagttcttgttgaacgaaagcagttccttgaatccacttctggcaagaaccagctacaagttgcagatttgtgtttccatggcgcttctattgaagatttgtgtttagattttactcttccaggttatcctgattatgtgcttaaagagggtgaaggaggcacaattgtaagtgatgaagttccatattagcgtgtatttatcttggtgatttcactttgtatgttttaatctgttagtatcatctgcaggttaatatttataatttagaagagtatattactttggtggtggatgctacagttaagtcagggataaagcgacaggttgaggcatttagatcagggtttaatcaggtacagcctcattggcattgctctaacacaatcttataataattctacttgttctgattttgtgtagttcagtttactctaatagttcttgtttattttaatgtttcgtaggtgtttgacatgtcatccctccacatattttcacctcaagaacttgactatctaatatgtggtcgacaagaaatttgggaggtaatgttctgtcctttttatccaagttaatgtatgtaaaagtgtggcactaaataaaccttggaatctgcagtcggaatccctggtggataacataaaatttgatcatggatatactgctaaaagtcctgcgatcgtgaatgtaagctcattcgtcctcacatgctacatctcttacatacatccagttgtggtttttgagaagtgtggttccttgattcttgctcttgtttgtagctactcgagattttgtcagaattcacccctgagcagcagcatgcgttctgccagtttgtaaccggtgctcctcggcttccacatggtggattggctgcccttagccccaagcttactatagttaggaaggtaccttttcatggtctatctatcgtggcatttgctataatgacatgtgcacacctattctgcttgatgttatttttggggtaactcggtgttttgattattgccagcatccttcaagtgctgtgaatacttcaaattcaactggggcagtagagtccgctgatgatgatttgcctagtgtgatgaccaattatctgaagctgcccccctactccacaaaagtacagtgtccttgctgttttatcactaaaaagtcagcttgacattctgatggttcctgctgacgggctgttgctattgtttggacaggaaatcatgcgcaagaagttgctttatgcgatcctggaaggccgaggatcatttgatctttcataagaaatatacaatatccgaactaacatacaggggtcagttttattctggagatttagtttcttggtccatgtataacactgagttgaggttaccagctcactcagcaaacggcttcaagggcgagagccccagtcctcactcggatgcaggtgctgctgtcgatttctcccttcttttacatttgttcagctactgtattctcttcgagggttgcccttgtcacctgcaattatgaatctacagcttttgtcatcgaggaagtttaacagattttggtttctctaccatgatctgtttccattgggcaggctaagctatagtaattgaggatgtgcgccttgagtgaggatgtgcgccaacaagaacccccgtttgtttcagtacatgtaaataaaagggattttttgttccagaattgttatctgtaacaagaacatctacatctgtgatgactgaccattaataaatgtgtcccggtgtaccatttgtttt

SEQ ID NO: 126 - DNA, 10 bp, Glycine max
cgctcccgtt

SEQ ID NO: 127 - DNA, 11 bp, Glycine max
catccaatact

SEQ ID NO: 128 - DNA, 26 bp, Glycine max
tttgcctagtgtcatgacttgcgcca

1. A plant or plant part thereof comprising at least one non-natural mutation in an endogenous Homologous to E6AP C-Terminus (HECT) E3 Ubiquitin Protein Ligase (UPL) gene encoding a HECT E3 UPL polypeptide, optionally, an endogenous HECT E3 UPL3 gene encoding a HECT E3 UPL3 polypeptide, optionally, an endogenous HECT E3 UPL3a gene, an endogenous HECT E3 UPL3b gene, an endogenous HECT E3 UPL3b gene, or an endogenous HECT E3 UPL3d gene.

2-3. (canceled)

4. The plant or part thereof of claim 1, wherein the plant or plant part comprises two to four copies of the endogenous HECT E3 UPL gene (e.g., a HECT E3 UPL3a gene, a HECT E3 UPL3b gene, a HECT E3 UPL3b gene, and/or HECT E3 UPL3d gene) and the two to four copies of the endogenous HECT E3 UPL gene comprise one or more non-natural mutations.

5-10. (canceled)

11. The plant or part thereof of claim 1, wherein the at least one non-natural mutation is an out-of-frame insertion or deletion or an in-frame insertion or deletion, optionally wherein the at least one non-natural mutation is an out-of-frame insertion or deletion that produces a premature stop codon, optionally wherein the in-frame deletion results in a mutated HECT E3 UPL gene having at least 90% sequence identity to any one of the nucleotide sequences of SEQ ID NOs:119-125.

12. The plant or part thereof of claim 1, wherein the at least one non-natural mutation is in the N-terminal region of the HECT E3 UPL3 polypeptide encoded by the endogenous HECT E3 UPL3 gene, optionally, wherein the N-terminal region of the HECT E3 UPL3 polypeptide comprises: (a) a sequence having at least 80% sequence identity to any one of SEQ ID NOs:84-87, and/or (b) an amino acid sequence having at least 80% sequence identity to a region of consecutive amino acid residues: from residue 50 to residue 95, residue 43 to residue 102, and/or residue 36 to residue 109 with reference to the residue numbering of SEQ ID NO:78, from residue 48 to residue 87, residue 41 to residue 94, and/or residue 34 to residue 101 with reference to the residue numbering of SEQ ID NO:79, from residue 139 to residue 194, residue 132 to residue 201, and/or residue 125 to residue 208 with reference to the residue numbering of SEQ ID NO:80, and/or from residue 104 to residue 146, residue 97 to residue 153, and/or residue 90 to residue 160 with reference to the residue numbering of SEQ ID NO:81.

13. (canceled)

14. The plant or part thereof of claim 1, wherein the at least one non-natural mutation is in an active site of the HECT E3 UPL3 polypeptide encoded by the endogenous HECT E3 UPL3 gene, optionally, wherein the active site is in a region of the HECT E3 UPL3 polypeptide comprising: (a) an amino acid sequence having at least 80% identity to any one of SEQ ID NO:88-93 and/or (b) an amino acid sequence having at least 80% sequence identity to a region of consecutive amino acid residues: from residue 1814 to residue 1865, residue 1822 to residue 1857, and/or residue 1829 to residue 1851 with reference to the residue numbering of SEQ ID NO:78, from residue 1820 to residue 1870, residue 1827 to residue 1863, and/or residue 1834 to residue 1856 with reference to the residue numbering of SEQ ID NO:79, from residue 1838 to residue 1888, residue 1845 to residue 1881, and/or residue 1852 to residue 1874 with reference to the residue numbering of SEQ ID NO:80, from residue 1834 to residue 1884, residue 1841 to residue 1877, and/or residue 1848 to residue 1870 with reference to the residue numbering of SEQ ID NO:81, from residue 1783 to residue 1833, residue 1790 to residue 1826, and/or residue 1797 to residue 1818 with reference to the residue numbering of SEQ ID NO:82, or from residue 1776 to residue 1826, residue 1783 to residue 1819, and/or residue 1790 to residue 1812 with reference to the residue numbering of SEQ ID NO:83.

15. (canceled)

16. The plant or part thereof of claim 14, wherein the at least one non-natural mutation in an active site of the HECT E3 UPL3 gene results in a substituted amino acid residue, optionally, wherein the at least one non-natural mutation is a substitution of an amino acid residue located: at position 1839 with reference to amino acid position numbering of SEQ ID NO:78, at position 1844 with reference to amino acid position numbering of SEQ ID NO:79, at position 1862 with reference to amino acid position numbering of SEQ ID NO:80, at position 1858 with reference to amino acid position numbering of SEQ ID NO:81, at position 1807 with reference to amino acid position numbering of SEQ ID NO:82, or at position 1800 with reference to amino acid position numbering of SEQ ID NO:83 optionally, wherein the substitution is a cysteine to a serine.

17-18. (canceled)

19. The plant or part thereof of claim 1, wherein the endogenous HECT E3 UPL gene (a) comprises a sequence having at least 80% sequence identity to any one of the nucleotide sequences of SEQ ID NOs: 72-77, (b) encodes a polypeptide that comprises a sequence having at least 80% sequence identity to any one of the amino acid sequences of SEQ ID NOs:78-83, (c) comprises a region having at least 80% sequence identity to any one of the amino acid sequences of SEQ ID NOs:84-92, and/or (d) comprises a region having at least 90% identity to SEQ ID NO:93.

20. (canceled)

21. The plant or plant part thereof of claim 1, wherein the plant is corn, soybean, canola, wheat, rice, cotton, sugarcane, sugar beet, barley, oats, alfalfa, sunflower, safflower, oil palm, sesame, coconut, tobacco, potato, sweet potato, cassava, coffee, apple, plum, apricot, peach, cherry, pear, fig, banana, citrus, cocoa, avocado, olive, almond, walnut, strawberry, watermelon, pepper, grape, tomato, cucumber, or a Brassica spp., optionally, wherein the plant is soybean, canola, or corn.

22. (canceled)

23. The plant or part thereof of claim 1, wherein the plant comprising the at least one non-natural mutation has a phenotype of one or more improved yield traits as compared to a plant devoid of the at least one mutation (e.g., an isogenic plant (e.g., wild type unedited plant or a null segregant), optionally, wherein the one or more improved yield traits includes higher yield (bu/acre), increased kernel row number, optionally wherein ear length is not substantially reduced, increased kernel number, increased kernel size, increased ear length, decreased tiller number, decreased tassel branch number, increased number of pods per node, increased number of pods per plant, and/or increased seed weight as compared to a control plant devoid of the at least one non-natural mutation, optionally wherein the one or more improved yield traits is increase seed size and/or increased seed oil content.

24-28. (canceled)

29. A plant regenerated from the plant part of claim 1, optionally wherein the plant comprises a mutated HECT E3 UPL3 gene comprising a nucleotide sequence having at least 90% sequence identity to any one of SEQ ID NOs:119-125, optionally, wherein the plant comprises a phenotype of one or more improved yield traits, optionally the one or more improved yield traits includes higher yield (bu/acre), increased kernel row number, optionally wherein ear length is not substantially reduced, increased kernel number, increased kernel size, increased ear length, decreased tiller number, decreased tassel branch number, increased number of pods per node, increased number of pods per plant, and/or increased seed weight as compared to a control plant devoid of the at least one non-natural mutation, optionally wherein the one or more improved yield traits is increase seed size and/or increased seed oil content.

30-48. (canceled)

49. A method for editing a specific site in the genome of a plant cell, the method comprising: cleaving, in a site-specific manner, a target site within an endogenous Homologous to E6AP C-Terminus (HECT) E3 Ubiquitin Protein Ligase (UPL) gene in the plant cell, the endogenous HECT E3 UPL gene:
(a) comprising a sequence having at least 80% sequence identity to any one of the nucleotide sequences of SEQ ID NOs:72-77,
(b) encoding a sequence having at least 80% sequence identity to an amino acid sequence of any one of SEQ ID NOs:78-83,
(c) encoding a region having at least 80% sequence identity to an amino acid sequence of any one of SEQ ID NOs:84-92, and/or
(d) encoding a region having at least 90% identity to the amino acid sequence of SEQ ID NO:93, thereby generating an edit in the endogenous HECT E3 UPL gene of the plant cell and producing a plant cell comprising the edit in the endogenous HECT E3 UPL gene.

50. The method of claim 49, further comprising regenerating a plant from the plant cell comprising the edit in the endogenous HECT E3 UPL gene to produce a plant comprising the edit in its endogenous HECT E3 UPL gene, optionally, wherein the edit results in a non-natural mutation, optionally wherein the edit results in a mutated HECT E3 UPL gene having at least 90% sequence identity to a nucleotide sequence of any one of SEQ ID NOs:119-125.

51. (canceled)

52. The method of claim 50, wherein the plant comprising the edit in its endogenous HECT E3 UPL gene exhibits a phenotype of one or more improved yield traits as compared to a plant devoid of the at least one mutation (e.g., an isogenic plant (e.g., wild type unedited plant or a null segregant), optionally wherein the one or more improved yield traits includes higher yield (bu/acre), increased kernel row number, optionally wherein ear length is not substantially reduced, increased kernel number, increased kernel size, increased ear length, decreased tiller number, decreased tassel branch number, increased number of pods per node, increased number of pods per plant, increased seed weight/size and/or increased seed oil content as compared to a control plant devoid of the at least one non-natural mutation.

53. The method of claim 50, wherein the endogenous HECT E3 UPL gene encodes a HECT E3 UPL polypeptide and the edit results in variation in the amino acid residues located: at position 1839 with reference to amino acid position numbering of SEQ ID NO:78, at position 1844 with reference to amino acid position numbering of SEQ ID NO:79, at position 1862 with reference to amino acid position numbering of SEQ ID NO:80, at position 1858 with reference to amino acid position numbering of SEQ ID NO:81, at position 1807 with reference to amino acid position numbering of SEQ ID NO:82, or at position 1800 with reference to amino acid position numbering of SEQ ID NO:83.

54-56. (canceled)

57. A method for producing a plant or part thereof comprising a mutated endogenous Homologous to E6AP C-Terminus (HECT) E3 Ubiquitin Protein Ligase (UPL) gene and exhibiting one or more improved yield traits, the method comprising contacting a target site in an endogenous HECT E3 UPL gene in the plant or plant part with a nuclease comprising a cleavage domain and a nucleic acid binding domain, wherein the nucleic acid binding domain binds to a target site in the endogenous HECT E3 UPL gene, wherein the endogenous HECT E3 UPL gene:
(a) comprises a sequence having at least 80% sequence identity to the nucleotide sequence of any one of SEQ ID NOs:72-77;
(b) encodes an amino acid sequence having at least 80% sequence identity to any one of SEQ ID NOs:78-83;
(c) encodes an amino acid sequence comprising a region having at least 80% sequence identity to any one of SEQ ID NOs:84-92; and/or
(d) encodes an amino acid sequence comprising a region having at least 90% identity to the amino acid sequence of SEQ ID NO:93, thereby producing the plant or part thereof comprising an endogenous HECT E3 UPL gene having a mutation and exhibiting one or more improved yield traits, optionally, wherein the one or more improved yield traits includes higher yield (bu/acre), increased kernel row number, optionally wherein ear length is not substantially reduced, increased kernel number, increased kernel size, increased ear length, decreased tiller number, decreased tassel branch number, increased number of pods per node, increased number of pods per plant, increased seed size (e.g., area, weight), and/or increase seed oil content as compared to a control plant devoid of the at least one non-natural mutation, optionally wherein the one or more improved yield traits is increase seed size and/or increased seed oil content.

58. (canceled)

59. The method of claim 57, wherein the endogenous HECT E3 UPL gene is an endogenous HECT E3 UPL3 gene, optionally an endogenous HECT E3 UPL3a gene, an endogenous HECT E3 UPL3b gene, an endogenous HECT E3 UPL3b gene, or an endogenous HECT E3 UPL3d gene.

60-62. (canceled)

63. The method of claim 57, wherein the mutation is a dominant negative mutation or null mutation, optionally wherein the mutation is a non-natural mutation.

64. The method of claim 57, wherein the mutation is a substitution, an insertion, an inversion and/or a deletion, optionally wherein the mutation is an out-of-frame insertion or deletion or an in-frame insertion or deletion, optionally wherein the out-of-frame insertion or deletion results in a premature stop codon, optionally, wherein the mutation is a deletion of one base pair to about 100 base pairs, optionally wherein the deletion results in a mutated HECT E3 UPL gene having at least 90% sequence identity to a nucleotide sequence of any one of SEQ ID NOs:119-125.

65-66. (canceled)

67. The method of claim 57, wherein the mutation results in a modified amino acid residue located: at position 1839 with reference to amino acid position numbering of SEQ ID NO:78, at position 1844 with reference to amino acid position numbering of SEQ ID NO:79, at position 1862 with reference to amino acid position numbering of SEQ ID NO:80 at position 1858 with reference to amino acid position numbering of SEQ ID NO:81, at position 1807 with reference to amino acid position numbering of SEQ ID NO:82, or at position 1800 with reference to amino acid position numbering of SEQ ID NO:83.

68-69. (canceled)

70. A plant produced by the method of claim 57, optionally wherein the plant comprises a mutated HECT E3 UPL gene having at least 90% sequence identity to a nucleotide sequence of any one of SEQ ID NOs:119-125.

71-95. (canceled)
